(19) United States
(12) Patent Application Publication
(10) Pub. No.: US 2003/0027998 A1
(43) Pub. Date: Feb. 6, 2003

(54) Novel genes encoding proteins having prognostic, diagnostic, preventive, therapeutic, and other uses

(76) Inventors: Douglas A. Holtzman, Jamaica Plain, MA (US); Thomas M. Barnes, Brookline, MA (US)

Correspondence Address: PENNIE AND EDMONDS, 1155 AVENUE OF THE AMERICAS, NEW YORK, NY, 100362711

(21) Appl. No.: 09/796,753

(22) Filed: Mar. 1, 2001

Related U.S. Application Data
(63) Continuation-in-part of application No. 09/183,175, filed on Oct. 30, 1998, now abandoned.
(63) Continuation-in-part of application No. 09/599,596, filed on Jun. 22, 2000, now abandoned.
Application No. 09/599,596 is a division of application No. 09/223,546, filed on Dec. 30, 1998, now abandoned.
Application No. 09/599,596 is a division of application No. 09/471,179, filed on Dec. 23, 1999.
Application No. 09/471,179 is a continuation-in-part of application No. 09/223,546, filed on Dec. 30, 1998, now abandoned.
(63) Continuation-in-part of application No. 09/474,072, filed on Dec. 29, 1999.
Application No. 09/474,072 is a continuation-in-part of application No. 09/224,246, filed on Dec. 30, 1998, now abandoned.
(63) Continuation-in-part of application No. 09/474,071, filed on Dec. 29, 1999, now abandoned.
Application No. 09/474,071 is a continuation-in-part of application No. 09/223,094, filed on Dec. 30, 1998, now abandoned.
(63) Continuation-in-part of application No. 09/514,010, filed on Feb. 25, 2000, now abandoned.
Application No. 09/514,010 is a continuation-in-part of application No. 09/259,388, filed on Feb. 26, 1999, now abandoned.
(63) Continuation-in-part of application No. 09/516,745, filed on Mar. 1, 2000, now abandoned.
(63) Continuation-in-part of application No. 09/597,993, filed on Jun. 19, 2000.
Application No. 09/597,993 is a continuation-in-part of application No. 09/336,536, filed on Jun. 18, 1999.
(63) Continuation-in-part of application No. 09/630,334, filed on Jul. 31, 2000.
Application No. 09/630,334 is a continuation-in-part of application No. 09/365,164, filed on Jul. 30, 1999, now abandoned.
(63) Continuation-in-part of application No. 09/665,666, filed on Sep. 20, 2000.
Application No. 09/665,666 is a continuation-in-part of application No. 09/399,723, filed on Sep. 20, 1999, now abandoned.
(63) Continuation-in-part of application No. 09/667,751, filed on Sep. 21, 2000.
Application No. 09/667,751 is a continuation-in-part of application No. 09/409,634, filed on Sep. 30, 1999, now abandoned.
(63) Continuation-in-part of application No. 09/572,002, filed on May 15, 2000.
Application No. 09/572,002 is a continuation-in-part of application No. 09/312,359, filed on May 14, 1999, now abandoned.
(63) Continuation-in-part of application No. 09/606,565, filed on Jun. 29, 2000.
Application No. 09/606,565 is a continuation-in-part of application No. 09/342,687, filed on Jun. 29, 1999, now abandoned.
(63) Continuation-in-part of application No. 09/606,317, filed on Jun. 29, 2000.
Application No. 09/606,317 is a continuation-in-part of application No. 09/345,464, filed on Jun. 30, 1999, now abandoned.
(60) Provisional application No. 60/122,458, filed on Mar. 1, 1999.

(51) Int. Cl. C07H 21/02; C07H 21/04

(52) U.S. Cl. 536/23.1

(57) ABSTRACT

The invention provides isolated nucleic acid molecules and polypeptide molecules. The invention also provides antisense nucleic acid molecules, expression vectors containing the nucleic acid molecules of the invention, host cells into which the expression vectors have been introduced, and non-human transgenic animals in which a nucleic acid molecule of the invention has been introduced or disrupted. The invention still further provides isolated polypeptides, fusion polypeptides, antigenic peptides and antibodies. Diagnostic, screening and therapeutic methods utilizing compositions of the invention are also provided.

[0001] This application is a continuation-in-part of U.S. patent application Ser. No. 09/572,002, filed May 14, 2000, which is a continuation-in-part of U.S. patent application Ser. No. 09/312,359, filed May 14, 1999.

[0002] This application is a continuation-in-part of U.S. patent application Ser. No. 09/606,565, filed Jun. 29, 2000, which is a continuation-in-part of U.S. patent application Ser. No. 09/342,687, filed Jun. 29, 1999.

[0003] This application is a continuation-in-part of U.S. patent application No. 09/606,317, filed Jun. 29, 2000, which is a continuation-in-part of U.S. patent application No. 09/345,464, filed Jun. 30, 1999.

[0004] Each of the applications cross-referenced in this section are incorporated into this disclosure by reference in its entirety.

### BACKGROUND OF THE INVENTION

[0005] Many secreted proteins, for example, cytokines and cytokine receptors, play a vital role in the regulation of cell growth, cell differentiation, and a variety of specific cellular responses. A number of medically useful proteins, including erythropoietin, granulocyte-macrophage colony stimulating factor, human growth hormone, and various interleukins, are secreted proteins. Thus, an important goal in the design and development of new therapies is the identification and characterization of secreted and transmembrane proteins and the genes which encode them

[0006] Many secreted proteins are receptors which bind a ligand and transduce an intracellular signal, leading to a variety of cellular responses. The identification and characterization of such a receptor enables one to identify both the ligands which bind to the receptor and the intracellular molecules and signal transduction pathways associated with the receptor, permitting one to identify or design modulators of receptor activity, e.g., receptor agonists or antagonists and modulators of signal transduction.

### SUMMARY OF THE INVENTION

[0007] The present invention is based, at least in part, on the discovery of cDNA molecules which encode the INTERCEPT 258, INTERCEPT 307 and INTERCEPT 340, MANGO 003, MANGO 245, MANGO 346, MANGO 347, MANGO 349, and MANGO 511, and TANGO 128, TANGO 136, TANGO 140, TANGO 176, TANGO 197, TANGO 201, TANGO 204, TANGO 206, TANGO 209, TANGO 212, TANGO 213, TANGO 214, TANGO 216, TANGO 221, TANGO 222, TANGO 223, TANGO 224, TANGO 244, TANGO 246, TANGO 253, TANGO 257, TANGO 261, TANGO 262, TANGO 266, TANGO 267, TANGO 272, TANGO 275, TANGO 295, TANGO 315, TANGO 330, TANGO 339, TANGO 354, TANGO 358, TANGO 361, TANGO 365, TANGO 368, TANGO 369, TANGO 378, TANGO 383, TANGO 437, TANGO 480, and TANGO 499 proteins, all of which are either wholly secreted or transmembrane polypeptides.

[0008] The TANGO 214 proteins share significant homology to the human HtrA protein, the human homologue of the E. coli HtrA (high temperature requirement) gene product, a critical component of the bacterial response to stress. Because of their homology to the human HtrA protein, TANGO 214 proteins (and the nucleic acids that encode them) are referred to herein as HtrA-2 proteins (and nucleic acid molecules).

[0009] The TANGO 253 proteins are Clq domain-containing polypeptides that exhibit homology to a human adipocyte complement-related protein precursor.

[0010] The TANGO 257 proteins are homologous to the human extracellular molecule olfactomedin, a molecule important in the maintenance, growth and differentiation of chemosensory cilia of olfactory neurons.

[0011] The INTERCEPT 258 proteins are Ig domain-containing polypeptides that exhibit homology to an antigen (A33) expressed in colonic and small bowel epithelium, a protein that may represent a cancer cell marker.

[0012] The TANGO 339 proteins are transmembrane 4 domain-containing polypeptides that exhibit homology to human CD9 antigen, a cell surface antigen associated with platelet activation and aggregation.

[0013] The TANGO 358, and TANGO 365 proteins are transmembrane proteins.

[0014] The TANGO 368 proteins are secreted proteins encoded by sequences with homology to genomic sequences of the human T-cell receptor gamma VI gene region.

[0015] The TANGO 383 proteins are transmembrane polypeptides with homology to retinopathy proteins.

[0016] The MANGO 346, MANGO 349, and TANGO 369 proteins are secreted proteins.

[0017] The INTERCEPT 307 are transmembrane proteins that are related to the prostate cancer upregulated PB39 gene product.

[0018] The MANGO 511 proteins are related to the leukocyte Ig-like receptors (LIRs) which bind MHC class I.

[0019] The TANGO 361 proteins are Trypsin domain-containing polypeptides that exhibit homology to human serine proteases which belong to the trypsin-like protease family.

[0020] The TANGO 499 proteins are GDNF-like domain-containing polypeptides that exhibit homology to human Persephin, Artemin, Neurturin and GDNF, cell surface antigens associated with embryogenesis and development.

[0021] The TANGO 315 proteins are transmembrane polypeptides related to CD33 polypeptides and the Ob binding protein.

[0022] The TANGO 330 proteins are transmembrane and secreted polypeptides and are related to roundabout polypeptides.

[0023] The TANGO 437 proteins are transmembrane polypeptides containing ion transport, cell cycle protein and putative permease domains.

[0024] The TANGO 480 proteins are transmembrane polypeptides containing NADH-Ubiquinone/plastoquinone (complex 1) domains.

[0025] The INTERCEPT 258, INTERCEPT 307 and INTERCEPT 340, MANGO 003, MANGO 245, MANGO 346, MANGO 347, MANGO 349, and MANGO 511, and TANGO 128, TANGO 136, TANGO 140, TANGO 176, TANGO 197, TANGO 201, TANGO 204, TANGO 206, TANGO 209, TANGO 212, TANGO 213, TANGO 214, TANGO 216, TANGO 221, TANGO 222, TANGO 223, TANGO 224, TANGO 244, TANGO 246, TANGO 253, TANGO 257, TANGO 261, TANGO 262, TANGO 266, TANGO 267, TANGO 272, TANGO 275, TANGO 295, TANGO 315, TANGO 330, TANGO 339, TANGO 354, TANGO 358, TANGO 361, TANGO 365, TANGO 368, TANGO 369, TANGO 378, TANGO 383, TANGO 437, TANGO 480, and TANGO 499 proteins, fragments, derivatives, and variants thereof of the present invention are collectively referred to herein as “polypeptides of the invention” or “proteins of the invention.”

[0026] Nucleic acid molecules encoding the polypeptides or proteins of the invention are collectively referred to as “nucleic acids of the invention.” The nucleic acids and polypeptides of the present invention are useful as modulating agents in regulating a variety of cellular processes. Accordingly, in one aspect, this invention provides isolated nucleic acid molecules encoding a polypeptide of the invention or a biologically active portion thereof. The present invention also provides nucleic acid molecules which are suitable for use as primers or hybridization probes for the detection of nucleic acids encoding a polypeptide of the invention.

[0027] The present invention is based, at least in part, on the discovery of human cDNA molecules which encode proteins which are herein designated INTERCEPT 258, INTERCEPT 307 and INTERCEPT 340, MANGO 003, MANGO 245, MANGO 346, MANGO 347, MANGO 349, and MANGO 511, and TANGO 128, TANGO 136, TANGO 140, TANGO 176, TANGO 197, TANGO 201, TANGO 204, TANGO 206, TANGO 209, TANGO 212, TANGO 213, TANGO 214, TANGO 216, TANGO 221, TANGO 222, TANGO 223, TANGO 224, TANGO 244, TANGO 246, TANGO 253, TANGO 257, TANGO 261, TANGO 262, TANGO 266, TANGO 267, TANGO 272, TANGO 275, TANGO 295, TANGO 315, TANGO 330, TANGO 339, TANGO 354, TANGO 358, TANGO 361, TANGO 365, TANGO 368, TANGO 369, TANGO 378, TANGO 383, TANGO 437, TANGO 480, and TANGO 499. These proteins, fragments thereof, derivatives thereof, and variants thereof are collectively referred to herein as the polypeptides of the invention or the proteins of the invention. Nucleic acid molecules encoding polypeptides of the invention are collectively referred to as nucleic acids of the invention.

[0028] The nucleic acids and polypeptides of the present invention are useful as modulating agents for regulating a variety of cellular processes. Accordingly, in one aspect, the present invention provides isolated nucleic acid molecules encoding a polypeptide of the invention or a biologically active portion thereof. The present invention also provides nucleic acid molecules which are suitable as primers or hybridization probes for the detection of nucleic acids encoding a polypeptide of the invention.

[0029] The invention includes fragments of any of the nucleic acids described herein wherein the fragment retains a biological or structural function by which the full-length nucleic acid is characterized (e.g., an activity, an encoded protein, or a binding capacity). The invention furthermore includes fragments of any of the nucleic acids described herein wherein the fragment has a nucleotide sequence sufficiently (e.g., 50%, 60%, 70%, 80%, 85%, 90%, 95%, 98%, or 99% or greater) identical to the nucleotide sequence of the corresponding full-length nucleic acid that it retains a biological or structural function by which the full-length nucleic acid is characterized (e.g., an activity, an encoded protein, or a binding capacity).

[0030] The invention includes fragments of any of the polypeptides described herein wherein the fragment retains a biological or structural function by which the full-length polypeptide is characterized (e.g., an activity or a binding capacity). The invention furthermore includes fragments of any of the polypeptides described herein wherein the fragment has an amino acid sequence sufficiently (e.g., 50%, 60%, 70%, 80%, 85%, 90%, 95%, 98%, or 99% or greater) identical to the amino acid sequence of the corresponding full-length polypeptide that it retains a biological or structural function by which the full-length polypeptide is characterized (e.g., an activity or a binding capacity).

[0031] The invention also features nucleic acid molecules which are at least 40% (or 50%, 60%, 70%, 80%, 90%, 95%, or 98%) identical to the nucleotide sequence of any of SEQ ID NOs: 1, 3, 5, 7, 9, 11, 13, 15, 17, 19, 21, 23, 25, 27, 29, 31, 33, 35, 37, 39, 41, 43, 45, 47, 49, 51, 53, 55, 57, 59, 61, 63, 65, 67, 69, 71, 73, 75, 77, 79, 81, 83, 85, 87, 89, 91, 93, 95, 97, 99, 101, 103, 105, 107, 109, 111, 113, 115, 117, 119, 121, 123, 125, 127, 129, 131, 133, 135, 137, 139, 141, 143, 145, 147, 149, 151, 153, 155, 157, 159, 161, and 163, the TANGO 136 nucleotide sequence of the cDNA insert of a clone deposited on Sep. 11, 1998 with the ATCC® as accession no. 98880, the TANGO 128, TANGO 140, TANGO 197 and TANGO 214 nucleotide sequences of cDNA inserts of clones deposited on Nov. 20, 1998 with the ATCC® as accession no. 98999, the TANGO 212 nucleotide sequence of the cDNA insert of a clone deposited on Sep. 10, 1998 with the ATCC® as accession no. 202171, the TANGO 213 nucleotide sequence of the cDNA insert of a clone deposited on Oct. 30, 1998 with the ATCC® as accession no. 98965, the TANGO 224 nucleotide sequence of the cDNA insert of a clone deposited on Oct. 30, 1998 with the ATCC® as accession no. 98966, the TANGO 176 nucleotide sequence of the cDNA insert of a clone deposited on Jan. 7, 1999 with the ATCC® as accession no. 207042, the TANGO 221 nucleotide sequence of the cDNA insert of a clone deposited on Jan. 7, 1999 with the ATCC® as accession no. 207044, the TANGO 222 nucleotide sequence of the cDNA insert of a clone deposited on Jan. 7, 1999 with the ATCC® as accession no. 207043, the TANGO 201 and TANGO 223 nucleotide sequence of the cDNA insert of a clone deposited on Jan. 22, 1999 with the ATCC® as accession no. 207081, the TANGO 216, TANGO 261, TANGO 262, TANGO 266 and TANGO 267 nucleotide sequence of the cDNA insert of a clone deposited on Mar. 26, 1999 with the ATCC® as accession no. 207176, the TANGO 253, TANGO 257, and INTERCEPT 258 nucleotide sequences of cDNA inserts of clones deposited on Apr. 21, 1999 with the ATCC® as accession no. 207222, the TANGO 253 nucleotide sequence of the cDNA insert of a clone deposited on Apr. 21, 1999 with the ATCC® as accession no. 207215, the TANGO 257 nucleotide sequence of the cDNA insert of a clone deposited on Apr. 21, 1999 with the ATCC® as accession no. 207217, the INTERCEPT 258, TANGO 206 and TANGO 209 nucleotide sequences of cDNA inserts of clones deposited on Apr. 21, 1999 with the ATCC® as accession no. 207221, the TANGO 204 nucleotide sequence of the cDNA insert of a clone deposited on Apr. 21, 1999 with the ATCC® as accession no. 207192, the TANGO 204 nucleotide sequence of the cDNA insert of a clone deposited on Apr. 21, 1999 with the ATCC® as accession no. 207189, the TANGO 206, TANGO 209, MANGO 245, TANGO 244 and TANGO 246 nucleotide sequence of the cDNA insert of a clone deposited on Apr. 21, 1999 with the ATCC® as accession no. 207223, the TANGO 275 nucleotide sequence of the cDNA insert of a clone deposited on Apr. 21, 1999 with the ATCC® as accession no. 207220, the INTERCEPT 340, MANGO 347 and TANGO 272 nucleotide sequences of cDNA inserts of clones deposited on Jun. 18, 1999 with the ATCC® as accession no. PTA-250, the MANGO 003 nucleotide sequence of the cDNA insert of a clone deposited on Mar. 27, 1999 with the ATCC® as accession no. 207178, the TANGO 295 nucleotide sequence of the cDNA insert of a clone deposited on Jun. 18, 1999 with the ATCC® as accession no. PTA-249, the TANGO 339 and TANGO 358 nucleotide sequences of cDNA inserts of clones deposited on Jun. 29, 1999 with the ATCC® as accession no. PTA-292, the MANGO 346, TANGO 365 and TANGO 368 nucleotide sequence of the cDNA insert of a clone deposited on Jun. 29, 1999 with the ATCC® as accession no. PTA-291, the MANGO 349, TANGO 369 and TANGO 383 nucleotide sequence of the cDNA insert of a clone deposited on Jun. 29, 1999 with the ATCC® as accession no. PTA-295, the INTERCEPT 307 and TANGO 499, form 1, variant 1 nucleotide sequences of cDNA inserts of clones deposited on Jun. 29, 1999 with the ATCC® as accession no. PTA-455, the TANGO 361 nucleotide sequence of the cDNA insert of a clone deposited on Jun. 29, 1999 with the ATCC® as accession no. PTA-438, the TANGO 499, from 2, variant 3 nucleotide sequence of the cDNA insert of a clone deposited on Aug. 5, 1999 with the ATCC® as accession no. PTA-454, the MANGO 511 nucleotide sequence of the cDNA insert of a clone deposited on Jul. 23, 1999 with the ATCC® as accession no. PTA-425, the TANGO 315, TANGO 437, TANGO 330 and TANGO 480 nucleotide sequences of cDNA inserts of clones deposited on Oct. 1, 1999 with the ATCC® as accession no. PTA-816, or a complement thereof.

[0032] These deposited nucleotide sequences are hereafter individually and collectively referred to as “the nucleotide sequence of any of the clones deposited as ATCC® Accession numbers 98880, 98999, 202171, 98965, 98966, 98899, 207042, 207044, 207043, 207081, 207176, 207222, 207215, 207217, 207221, 207192, 207189, 207223, 207221, 207220, PTA-250, 207178, PTA-250, PTA-249, PTA-292, PTA-291, PTA-295, PTA-455, PTA-438, PTA-454, PTA-425, and PTA-816.”

[0033] The invention features nucleic acid molecules which include a fragment of at least 15 (25, 40, 60, 80, 100, 150, 200, 250, 300, 350, 400, 450, 500, 600, 700, 800, 900, 1000, 1200, 1400, 1600, 1800, 2000, 2200, 2400, 2600, 2800, 3000, 3500, 4000, 4500, 5000, or more) consecutive nucleotide residues of any of SEQ ID NOs: 1, 3, 5, 7, 9, 11, 13, 15, 17, 19, 21, 23, 25, 27, 29, 31, 33, 35, 37, 39, 41, 43, 45, 47, 49, 51, 53, 55, 57, 59, 61, 63, 65, 67, 69, 71, 73, 75, 77, 79, 81, 83, 85, 87, 89, 91, 93, 95, 97, 99, 101, 103, 105, 107, 109, 111, 113, 115, 117, 119, 121, 123, 125, 127, 129, 131, 133, 135, 137, 139, 141, 143, 145, 147, 149, 151, 153, 155, 157, 159, 161, and 163, and the nucleotide sequence of any of the clones deposited as ATCC® Accession numbers 98880, 98999, 202171, 98965, 98966, 98899, 207042, 207044, 207043, 207081, 207176, 207222, 207215, 207217, 207221, 207192, 207189, 207223, 207221, 207220, PTA-250, 207178, PTA-250, PTA-249, PTA-292, PTA-291, PTA-295, PTA-455, PTA-438, PTA-454, PTA-425, and PTA-816, or a complement thereof.

[0034] The invention also features nucleic acid molecules which include a nucleotide sequence encoding a protein having an amino acid sequence that is at least 50% (or 60%, 70%, 80%, 90%, 95%, or 98%) identical to the amino acid sequence of any of SEQ ID NOs: 2, 4, 6, 8, 10, 12, 14, 16, 18, 20, 22, 24, 26, 28, 30, 32, 34, 36, 38, 40, 42, 44, 46, 48, 50, 52, 54, 56, 58, 60, 62, 64, 66, 68, 70, 72, 74, 76, 78, 80, 82, 84, 86, 88, 90, 92, 94, 96, 98, 100, 102, 104, 106, 108, 110, 112, 114, 116, 118, 120, 122, 124, 126, 128, 130, 132, 134, 136, 138, 140, 142, 144, 146, 148, 150, 152, 154, 156, 158, 160, 162, and 164, or the amino acid sequence encoded by the nucleotide sequence of any of the clones deposited as ATCC® Accession numbers 98880, 98999, 202171, 98965, 98966, 98899, 207042, 207044, 207043, 207081, 207176, 207222, 207215, 207217, 207221, 207192, 207189, 207223, 207221, 207220, PTA-250, 207178, PTA-250, PTA-249, PTA-292, PTA-291, PTA-295, PTA-455, PTA-438, PTA-454, PTA-425, and PTA-816 or a complement thereof.

[0035] In certain embodiments, the nucleic acid molecules have the nucleotide sequence of any of SEQ ID NOs: 1, 3, 5, 7, 9, 11, 13, 15, 17, 19, 21, 23, 25, 27, 29, 31, 33, 35, 37, 39, 41, 43,45, 47, 49, 51, 53, 55, 57, 59, 61, 63, 65, 67, 69, 71, 73, 75, 77, 79, 81, 83, 85, 87, 89, 91, 93, 95, 97, 99, 101, 103, 105, 107, 109, 111, 113, 115, 117, 119, 121, 123, 125, 127, 129, 131, 133, 135, 137, 139, 141, 143, 145, 147, 149, 151, 153, 155, 157, 159, 161, and 163, and the nucleotide sequence of any of the clones deposited as ATCC® Accession numbers 98880, 98999, 202171, 98965, 98966, 98899, 207042, 207044, 207043, 207081, 207176, 207222, 207215, 207217, 207221, 207192, 207189, 207223, 207221, 207220, PTA-250, 207178, PTA-250, PTA-249, PTA-292, PTA-291, PTA-295, PTA-455, PTA-438, PTA-454, PTA-425, and PTA-816.

[0036] Also within the invention are nucleic acid molecules which encode a fragment of a polypeptide having the amino acid sequence of any of SEQ ID NOs: 2, 4, 6, 8, 10, 12, 14, 16, 18, 20, 22, 24, 26, 28, 30, 32, 34, 36, 38, 40, 42, 44, 46, 48, 50, 52, 54, 56, 58, 60, 62, 64, 66, 68, 70, 72, 74, 76, 78, 80, 82, 84, 86, 88, 90, 92, 94, 96, 98, 100, 102, 104, 106, 108, 110, 112, 114, 116, 118, 120, 122, 124, 126, 128, 130, 132, 134, 136, 138, 140, 142, 144, 146, 148, 150, 152, 154, 156, 158, 160, 162, and 164, the fragment including at least 10 (12, 15, 20, 25, 30, 40, 50, 75, 100, 125, 150, 200, 250, 300, 400, 500, 750, 1000 or more) consecutive amino acid residues of any of SEQ ID NOs: 2, 4, 6, 8, 10, 12, 14, 16, 18, 20, 22, 24, 26, 28, 30, 32, 34, 36, 38, 40, 42, 44, 46, 48, 50, 52, 54, 56, 58, 60, 62, 64, 66, 68, 70, 72, 74, 76, 78, 80, 82, 84, 86, 88, 90, 92, 94, 96, 98, 100, 102, 104, 106, 108, 110, 112, 114, 116, 118, 120, 122, 124, 126, 128, 130, 132, 134, 136, 138, 140, 142, 144, 146, 148, 150, 152, 154, 156, 158, 160, 162, and 164.

[0037] The invention includes nucleic acid molecules which encode a naturally occurring allelic variant of a polypeptide comprising the amino acid sequence of any of SEQ ID NOs: 2, 4, 6, 8, 10, 12, 14, 16, 18, 20, 22, 24, 26, 28, 30, 32, 34, 36, 38, 40, 42, 44, 46, 48, 50, 52, 54, 56, 58, 60, 62, 64, 66, 68, 70, 72, 74, 76, 78, 80, 82, 84, 86, 88, 90, 92, 94, 96, 98, 100, 102, 104, 106, 108, 110, 112, 114, 116, 118, 120, 122, 124, 126, 128, 130, 132, 134, 136, 138, 140, 142, 144, 146, 148, 150, 152, 154, 156, 158, 160, 162, and 164, wherein the nucleic acid molecule hybridizes under stringent conditions to a nucleic acid molecule having a nucleic acid sequence of any of SEQ ID NOs: 1, 3, 5, 7, 9, 11, 13, 15, 17, 19, 21, 23, 25, 27, 29, 31, 33, 35, 37, 39, 41, 43, 45, 47, 49, 51, 53, 55, 57, 59, 61, 63, 65, 67, 69, 71, 73, 75, 77, 79, 81, 83, 85, 87, 89, 91, 93, 95, 97, 99, 101, 103, 105, 107, 109, 111, 113, 115, 117, 119, 121, 123, 125, 127, 129, 131, 133, 135, 137, 139, 141, 143, 145, 147, 149, 5151, 153, 155, 157, 159, 161, and 163, and the nucleotide sequence of any of the clones deposited as ATCC® Accession numbers 98880, 98999, 202171, 98965, 98966, 98899, 207042, 207044, 207043, 207081, 207176, 207222, 207215, 207217, 207221, 207192, 207189, 207223, 207221, 207220, PTA-250, 207178, PTA-250, PTA-249, PTA-292, PTA-291, PTA-295, PTA-455, PTA-438, PTA-454, PTA-425, and PTA-816, or a complement thereof.

[0038] Also within the invention are isolated polypeptides or proteins having an amino acid sequence that is at least about 50%, preferably 60%, 75%, 90%, 95%, or 98% identical to the amino acid sequence of any of SEQ ID NOs: 2, 4, 6, 8, 10, 12, 14, 16, 18, 20, 22, 24, 26, 28, 30, 32, 34, 36, 38, 40, 42, 44, 46, 48, 50, 52, 54, 56, 58, 60, 62, 64, 66, 68, 70, 72, 74, 76, 78, 80, 82, 84, 86, 88, 90, 92, 94, 96, 98, 100, 102, 104, 106, 108, 110, 112, 114, 116, 118, 120, 122, 124, 126, 128, 130, 132, 134, 136, 138, 140, 142, 144, 146, 148, 150, 152, 154, 156, 158, 160, 162, and 164.

[0039] Also within the invention are isolated polypeptides or proteins which are encoded by a nucleic acid molecule having a nucleotide sequence that is at least about 40%, preferably 50%, 60%, 75%, 85%, or 95% identical the nucleic acid sequence encoding any of SEQ ID NOs: 2, 4, 6, 8, 10, 12, 14, 16, 18, 20, 22, 24, 26, 28, 30, 32, 34, 36, 38, 40, 42, 44, 46, 48, 50, 52, 54, 56, 58, 60, 62, 64, 66, 68, 70, 72, 74, 76, 78, 80, 82, 84, 86, 88, 90, 92, 94, 96, 98, 100, 102, 104, 106, 108, 110, 112, 114, 116, 118, 120, 122, 124, 126, 128, 130, 132, 134, 136, 138, 140, 142, 144, 146, 148, 150, 152, 154, 156, 158, 160, 162, and 164, and isolated polypeptides or proteins which are encoded by a nucleic acid molecule consisting of the nucleotide sequence which hybridizes under stringent hybridization conditions to a nucleic acid molecule having the nucleotide sequence of any of SEQ ID NOs: 1, 3, 5, 7, 9, 11, 13, 15, 17, 19, 21, 23, 25, 27, 29, 31, 33, 35, 37, 39, 41, 43, 45, 47, 49, 51, 53, 55, 57, 59, 61, 63, 65, 67, 69, 71, 73, 75, 77, 79, 81, 83, 85, 87, 89, 91, 93, 95, 97, 99, 101, 103, 105, 107, 109, 111, 113, 115, 117, 119, 121, 123, 125, 127, 129, 131, 133, 135, 137, 139, 141, 143, 145, 147, 149, 151, 153, 155, 157, 159, 161, and 163, and the nucleotide sequence of any of the clones deposited as ATCC® Accession numbers 98880, 98999, 202171, 98965, 98966, 98899, 207042, 207044, 207043, 207081, 207176, 207222, 207215, 207217, 207221, 207192, 207189, 207223, 207221, 207220, PTA-250, 207178, PTA-250, PTA-249, PTA-292, PTA-291, PTA-295, PTA-455, PTA-438, PTA-454, PTA-425, and PTA-816.

[0040] Also within the invention are polypeptides which are naturally occurring allelic variants of a polypeptide that includes the amino acid sequence of any of SEQ ID NOs: 2, 4, 6, 8, 10, 12, 14, 16, 18, 20, 22, 24, 26, 28, 30, 32, 34, 36, 38, 40, 42, 44, 46, 48, 50, 52, 54, 56, 58, 60, 62, 64, 66, 68, 70, 72, 74, 76, 78, 80, 82, 84, 86, 88, 90, 92, 94, 96, 98, 100, 102, 5104, 106, 108, 110, 112, 114, 116, 118, 120, 122, 124, 126, 128, 130, 132, 134, 136, 138, 140, 142, 144, 146, 148, 150, 152, 154, 156, 158, 160, 162, and 164, wherein the polypeptide is encoded by a nucleic acid molecule which hybridizes under stringent conditions to a nucleic acid molecule having the nucleotide sequence of any of SEQ ID NOs: 1, 3, 5, 7, 9, 11, 13, 15, 17, 19, 21, 23, 25, 27, 29, 31, 33, 35, 37, 39, 41, 43, 45, 47, 49, 51, 53, 55, 57, 59, 61, 63, 65, 67, 69, 71, 73, 75, 77, 79, 81, 83, 85, 87, 89, 91, 93, 95, 97, 99, 101, 103, 105, 107, 109, 111, 113, 115, 117, 119, 121, 123, 125, 127, 129, 131, 133, 135, 137, 139, 141, 143, 145, 147, 149, 151, 153, 155, 157, 159, 161, and 163, and the nucleotide sequence of any of the clones deposited as ATCC® Accession numbers 98880, 98999, 202171, 98965, 98966, 98899, 207042, 207044, 207043, 207081, 207176, 207222, 207215, 207217, 207221, 207192, 207189, 207223, 207221, 207220, PTA-250, 207178, PTA-250, PTA-249, PTA-292, PTA-291, PTA-295, PTA-455, PTA-438, PTA-454, PTA-425, and PTA-816, or a complement thereof.

[0041] The invention also features nucleic acid molecules that hybridize under stringent conditions to a nucleic acid molecule having the nucleotide sequence of any of SEQ ID NOs: 1, 3, 5, 7, 9, 11, 13, 15, 17, 19, 21, 23, 25, 27, 29, 31, 33, 35, 37, 39, 41, 43, 45, 47, 49, 51, 53, 55, 57, 59, 61, 63, 65, 67, 69, 71, 73, 75, 77, 79, 81, 83, 85, 87, 89, 91, 93, 95, 97, 99, 101, 103, 105, 107, 109, 111, 113, 115, 117, 119, 121, 123, 125, 127, 129, 131, 133, 135, 137, 139, 141, 143, 145, 147, 149, 151, 153, 155, 157, 159, 161, and 163, and the nucleotide sequence of any of the clones deposited as ATCC® Accession numbers 98880, 98999, 202171, 98965, 98966, 98899, 207042, 207044, 207043, 207081, 207176, 207222, 207215, 207217, 207221, 207192, 207189, 207223, 207221, 207220, PTA-250, 207178, PTA-250, PTA-249, PTA-292, PTA-291, PTA-295, PTA-455, PTA-438, PTA-454, PTA-425, and PTA-816, or a complement thereof. In some embodiments, the isolated nucleic acid molecules encode a cytoplasmic, transmembrane, extracellular, or other domain of a polypeptide of the invention. In other embodiments, the invention provides an isolated nucleic acid molecule which is antisense to the coding strand of a nucleic acid of the invention.

[0042] The invention features nucleic acid molecules of at least 570, 600, 650, 700, 750, 800, 850, 900, 950, 1000, 1100, 1200, 1300, 1400, 1500, 1600, 1700, 1800, 1900, 2000, 2100, 2200, 2300, 2400, 2500, 2600, 2700, 2800 or 2835 nucleotides of the nucleotide sequence of the cDNA, the nucleotide sequence of the TANGO 128 cDNA clone of ATCC® Accession No. 98999, or a complement thereof. The invention also features nucleic acid molecules comprising at least 25, 50, 100, 150, 200, 250, 300, 350, 400, 450, 500, 600, 650, 700, 750, 800, 850, 900, 950, 1000, 1050, 1100, 1150, 1200, 1250, 1300, 1350, 1400, 1450, 1500, 1550, 1600, 1650, 1700, 1750, 1800, 1850, 1900, 1950, 2000, 2050, 2100, 2150, 2200 or 2230 nucleotides of nucleic acids 1 to 2233 of SEQ ID NO: 5, or a complement thereof.

[0043] The invention features nucleic acid molecules which include a fragment of at least 15, 25, 50, 75, 100, 150, 200, 250, 300, 350, 400, 450, 500, 550, 600, 650, 700, 750, 800, 850, 900, 950, 1000 or 1030 nucleotides of the nucleotide sequence of the human TANGO 128 open reading frame (ORF) of SEQ ID NO: 5, or a complement thereof.

[0044] The invention features nucleic acid molecules of at least 250, 275, 300, 325, 350, 375, 400, 425, 450, 475, 500, 525, 550, 575, 600, 625, 650, 675, 700, 725, 750 or 760 nucleotides of the nucleotide sequence of SEQ ID NO: 21, the nucleotide sequence of a mouse TANGO 128 cDNA, or a complement thereof. The invention features nucleic acid molecules comprising at least 25 30, 35, 40, 45, 50, 55, 60, 65, 70 or 77 nucleotides of nucleic acids 1 to 78 of mouse TANGO 128 cDNA, or a complement thereof. The invention features nucleic acid molecules comprising at least 25 30, 35, 40, 45, 50, 55 or 60 nucleotides of nucleic acids 257 to 318 of SEQ ID NO: 21, or a complement thereof.

[0045] The invention features nucleic acid molecules comprising at least 225, 250, 275, 300, 325, 350, 375, 400, 425, 450, 475, 500, 525 or 550 nucleotides of the nucleotide sequence of the open reading frame of SEQ ID NO: 21, or a complement thereof. The invention also features nucleic acid molecules comprising at least 25, 30, 35, 40, 45, 50, 55 or 60 nucleotides of nucleic acids 46 to 107 of the open reading frame of SEQ ID NO: 21, or a complement thereof.

[0046] The invention features nucleic acid molecules of at least 425, 450, 475, 500, 525, 550, 600, 650, 700, 750, 800, 850, 900, 950, 1000, 1100, 1200, 1300, 1400, 1500 or 1540 nucleotides of the nucleotide sequence of SEQ ID NO: 7, the nucleotide sequence of SEQ ID NO: 7, the nucleotide sequence of the TANGO 140-1 cDNA clone of ATCC® Accession No. 98999, or a complement thereof. The invention also features nucleic acid molecules comprising at least 25, 50, 100, 150, 200, 250, 300, 350 400, 450, 500 or 540 nucleotides of nucleic acids 1 to 545 of SEQ ID NO: 7, or a complement thereof. The invention also features nucleic acid molecules comprising at least 25, 50, 100, 150, 200, 250, 300, 350, 400, 450, 500, 550 or 580 nucleotides of nucleic acids 980 to 1550 of SEQ ID NO: 7, or a complement thereof.

[0047] The invention features nucleic acid molecules of at least 425, 450, 475, 500, 525, 550, 600, 650, 700, 750, 800, 850, 900, 950, 1000, 1100, 1200, 1300, 1400, 1500, 1650, 1700, 1750, 1800, 1850, 1900, 1950, 2000, 2050, 2100, 2150, 2200, 2300, 2350, 2400, 2450, 2500, 2550, 2600, 2650, 2700, 2750, 2800, 2850, 2900, 2950, 3000, 3050, 3100, 3150, 3200, 3250, 3300, 3350 or 3385 nucleotides of the nucleotide sequence of SEQ ID NO: 9, the nucleotide sequence of SEQ ID NO: 9, the nucleotide sequence of the TANGO 5140-2 cDNA clone of ATCC® Accession No. 98999, or a complement thereof. The invention also features nucleic acid molecules comprising at least 25, 50, 100, 150, 200, 250, 300, 350 400, 450, 500 or 540 nucleotides of nucleic acids 1 to 545 of SEQ ID NO: 9, or a complement thereof. The invention also features nucleic acid molecules comprising at least 25, 50, 100, 150, 200, 250, 300, 350, 400, 450, 500, 550, 600, 650, 700, 750, 800, 850, 900, 950, 1000, 1100, 1200, 1300, 1400, 1500, 1650, 1700, 1750, 1800, 1850, 1900, 1950, 2000, 2050, 2100, 2150, 2200, 2300, 2350 or 2400 nucleotides of nucleic acids 980 to 3385 of SEQ ID NO: 9, or a complement thereof.

[0048] The invention features nucleic acid molecules comprising at least 75, 100, 150, 200, 250, 300, 350, 400, 450, 500, 550, 600 or 615 nucleotides of the nucleotide sequence of SEQ ID NOs: 7 or 9, or a complement thereof. The invention features nucleic acid molecules comprising at least 25, 75, 100, 150, 200, 250, 300, 350, 400, 450, 500 or 545 nucleotides of nucleic acids 1 to 545 of human TANGO 140-1 or 140-2 ORFs of SEQ ID NOs: 7 or 9, or a complement thereof.

[0049] The invention features nucleic acid molecules of at least 520, 550, 600, 650, 700, 750, 800, 850, 900, 950, 1000, 1100,1200, 1300, 1400, 1500, 1600, 1700, 1800, 1900, 2000, 2100, 2200, 2250 or 2270 nucleotides of the nucleotide sequence of SEQ ID NO: 11, the nucleotide sequence of SEQ ID NO: 11, the TANGO 197 cDNA clone of ATCC® Accession No. 98999, or a complement thereof. The invention also features nucleic acid molecules comprising at least 25, 50, 100, 150, 200, 250, 300, 350, 400, 450, 500, 550, 600, 650, 700, 750 or 785 nucleotides of nucleic acids 1 to 789 of SEQ ID NO: 11, or a complement thereof. The invention also features nucleic acid molecules comprising at least 25, 50, 100, 150, 200, 250, 300, 350, 400, 450 or 500 nucleotides of nucleic acids 1164 to 1669 of SEQ ID NO: 11, or a complement thereof. The invention also features nucleic acid molecules comprising at least 25, 50 or 80 nucleotides of nucleic acids 2190 to 2272 of SEQ ID NO: 11, or a complement thereof.

[0050] The invention features nucleic acid molecules which include a fragment of at least 380,400,450, 500,550,600,650,700, 750, 800, 850,900,950, 1000, 1100, 1200, 1300, 1400, 1500, 1600, 1700, 1750 or 1770 nucleotides of the nucleotide sequence of the TANGO 197 ORF of SEQ ID NO: 11, or a complement thereof. The invention also features nucleic acid molecules comprising at least 25, 50, 100, 150, 200, 250, 300, 350, 400, 450, 500, 550 or 575 nucleotides of nucleic acids 1 to 576 of the TANGO 197 ORF of SEQ ID NO: 11, or a complement thereof.

[0051] The invention features nucleic acid molecules of at least 515, 550, 600, 650, 700, 750, 800, 850, 900, 950, 1000, 1100, 1200, 1300, 1400, 1500, 1600, 1700, 1800, 1900, 2000, 2100, 2200, 2250, 2250, 2300, 2350, 2400, 2450, 2500, 2550, 2600, 2650, 2700, 2750, 2800, 2850, 2900, 2950, 3000, 3050, 3100, 3150, 3200, 3250, 3300, 3500, 3550, 3600, 3650, 3700, 3750, 3800, 3850, 3900, 3950, 4000, 4050, 4100, 4150, 4200, 4250, 4300, 4350, 4400 or 4415 nucleotides of the nucleotide sequence of SEQ ID NO: 23, the nucleotide sequence of SEQ ID NO: 23, the nucleotide sequence of a mouse TANGO 197 cDNA, or a complement thereof. The invention also features nucleic acid molecules comprising at least 25, 50, 100, 150, 200, 250, 300, 350, 400, 450, 500, 550, 600, 650, 700, 750, 800, 850, 900, 950, 1000, 1050, 1100, 1150, 1200, 1250, 1300, 1350, 1400, 1450, 1500, 1550, 1600, 1650, 1700, 1750, 1800, 1850, 1900, 1950, 2000, 2050, 2100, 2200, 2250, 2300, 2350, 2400, 2450, 2500, 2550, 2600, 2650, 2700, 2750, 2800, 2850, 2900, 2950, 3000, 3050, 3100 or 3135 nucleotides of nucleic acids 1 to 3138 of SEQ ID NO: 23, or a complement thereof. The invention also features nucleic acid molecules comprising at least 25, 50, 100, 150, 200, 250, 300 or 320 nucleotides of nucleic acids 4094 to 4417 of SEQ ID NO: 23, or a complement thereof.

[0052] The invention features nucleic acid molecules which include a fragment of at least 390, 400, 450, 500, 550, 600, 650, 700, 750, 800, 850, 900, 950, 1000, 1100 or 1140 nucleotides of the nucleotide sequence of the mouse TANGO 197 ORF of SEQ ID NO: 23, or a complement thereof.

[0053] The invention features nucleic acid molecules of at least 545, 600, 650, 700, 750, 800, 850, 900, 950, 1000, 1100, 1200, 1300, 1400, 1500, 1600, 1700, 1800, 1900, 2000, 2100, 2200, 2250, 2250, 2300, 2350, 2400 or 2435 nucleotides of the nucleotide sequence of SEQ ID NO: 13, the nucleotide sequence of SEQ ID NO: 13, the nucleotide sequence of the TANGO 212 cDNA clone of ATCC® Accession No. 202171 or a complement thereof. The invention also features nucleic acid molecules comprising at least 25, 50, 100, 150, 200, 250, 300, 350, 400, 450, 500, 550, 600, 650, 700, 750, 800, 850, 900, 950, 1000, 1050, 1100, 1150, 1200, 1250 or 1270 nucleotides of nucleic acids 1 to 1273 of SEQ ID NO: 13, or a complement thereof. The invention also features nucleic acid molecules comprising at least 25, 50, 100, 150, 200, 250, 300 or 320 nucleotides of nucleic acids 4094 to 4417 of SEQ ID NO: 13, or a complement thereof.

[0054] The invention features nucleic acid molecules which include a fragment of at least 240, 275, 300, 350, 400, 450, 500, 550, 600, 650, 700, 750, 800, 850, 900, 950, 1000, 1100, 1150, 1200, 1250, 1300, 1350, 1400, 1450, 1500, 1550, 1600 or 1660 nucleotides of the nucleotide sequence of the TANGO 212 ORF of SEQ ID NO: 13, or a complement thereof. The invention also features nucleic acid molecules comprising at least 25, 50, 100, 150, 200, 250, 300, 350, 400, 450, 500, 550, 600, 650, 700, 750, 800, 850 or 900 nucleotides of nucleic acids 1 to 905 of the TANGO 212 ORF of SEQ ID NO: 13, or a complement thereof.

[0055] The invention features nucleic acid molecules of at least 785, 800, 850, 900, 950, 1000, 1050, 1100, 1150 or 1180 nucleotides of the nucleotide sequence of SEQ ID NO: 25, the nucleotide sequence of SEQ ID NO: 25, the nucleotide sequence of a mouse TANGO 212 cDNA, or a complement thereof. The invention also features nucleic acid molecules comprising at least 25, 50, 100, 150 or 190 nucleotides of nucleic acids 983 to 1180 of SEQ ID NO: 25, or a complement thereof.

[0056] The invention features nucleic acid molecules which include a fragment of at least 570, 600, 650, 700, 750, 800, 850, 900, 950 or 998 nucleotides of the nucleotide sequence of the TANGO 212 ORF of SEQ ID NO: 25, or a complement thereof. The invention also features nucleic acid molecules comprising at least 25, 50, 100, 150 or 180 nucleotides of nucleic acids 804 to 999 of the TANGO 212 ORF of SEQ ID NO: 25, or a complement thereof.

[0057] The invention features nucleic acid molecules of at least 530, 600, 650, 700, 750, 800, 850, 900, 950, 1000, 1100, 1200, 1300, 1400 or 1495 nucleotides of the nucleotide sequence of SEQ ID NO: 15, the nucleotide sequence of the TANGO 213 cDNA clone of ATCC® Accession No. 98965, or a complement thereof. The invention also features nucleic acid molecules comprising at least 25, 50, 100, 150, 200, 250, 300 or 360 nucleotides of nucleic acids 1 to 361 of SEQ ID NO: 15, or a complement thereof. The invention also features nucleic acid molecules comprising at least 25, 40, 50 or 60 nucleotides of nucleic acids 759 to 822 of SEQ ID NO: 15, or a complement thereof.

[0058] The invention features nucleic acid molecules which include a fragment of at least 250, 275, 300, 350, 400, 450, 500, 550, 600, 650, 700, 750, 800 or 810 nucleotides of the nucleotide sequence of the TANGO 213 ORF of SEQ ID NO: 15, or a complement thereof. The invention also features nucleic acid molecules comprising at least 25, 50, 100, 150, 200, 250 or 300 nucleotides of nucleic acids 1 to 304 of the TANGO 213 ORF of SEQ ID NO: 15, or a complement thereof. The invention also features nucleic acid molecules comprising at least 25, 40, 50 or 60 nucleotides of nucleic acids 701 to 764 of the TANGO 213 ORF of SEQ ID NO: 15, or a complement thereof.

[0059] The invention features nucleic acid molecules of at least 530, 600, 650, 700, 750, 800, 850, 900,950, 1000, 1100, 1200, 1300, 1400, 1500, 1600, 1700, 1800, 1900, 2000, 2100 or 2150 nucleotides of the nucleotide sequence of SEQ ID NO: 27, the nucleotide sequence of a mouse TANGO 213 cDNA, or a complement thereof. The invention also features nucleic acid molecules comprising at least 25, 50, 100, 150, 200, 250, 300, 350, 400, 450, 500, 550, 600, 650, 700, 750, 800, 850, 900, 950 or 1000 nucleotides of nucleic acids 1 to 1018 of SEQ ID NO: 27, or a complement thereof. The invention also features nucleic acid molecules comprising at least 25, 50, 100, 150, 200, 250, 300, 350, 400, 450, 500, 550, 600, 650, 700, 750, 800, 850, 900 or 920 nucleotides of nucleic acids 1227 to 2154 of SEQ ID NO: 27, or a complement thereof.

[0060] The invention features nucleic acid molecules which include a fragment of at least 25, 50, 100, 150, 200, 250, 275, 300, 350, 400, 450, 500, 550 or 575 nucleotides of the nucleotide sequence of mouse TANGO 213 ORF of SEQ ID NO: 27, or a complement thereof.

[0061] The invention features nucleic acid molecules of at least 570, 600, 650, 700, 750, 800, 850, 900, 950, 1000, 1100, 1200, 1300, 1400, 1500, 1600, 1700, 1800, 1900, 2000, 2100, 2150, 2200, 2250, 2300, 2350, 2400, 2450, 2500, 2550, 2600, 2650 or 2680 nucleotides of the nucleotide sequence of SEQ ID NO: 17, the nucleotide sequence of a human TANGO 224 cDNA form 1 or form 2 respectively, the nucleotide sequence of the TANGO 213 cDNA clone of ATCC® Accession Number 98966, or a complement thereof. The invention also features nucleic acid molecules comprising at least 25, 50, 100, 150, 200, 250 or 270 nucleotides of nucleic acids 1 to 272 of SEQ ID NO: 17, or a complement thereof. The invention also features nucleic acid molecules comprising at least 25, 50, 100, 150, 200, 250, 300, 350, 400, 450, 500, 550, 600, 650, 700, 750, 800, 850, 900, 950, 1000, 1050, 1100, 1150, 1200, 1250, 1300, 1350, 1400, 1450, 1500or 1530nucleotides of nucleic acids 573 to 2106 of SEQ ID NO: 17, or a complement thereof.

[0062] The invention features nucleic acid molecules which include a fragment of at least 300, 350, 400, 450, 500, 550, 600, 650, 700, 750, 800, 850, 900, 950, 1000, 1050, 1100, 1150, 1200, 1250, 1300 or 1360 nucleotides of the nucleotide sequence of human TANGO 224 form 1 ORF of SEQ ID NO: 17, or a complement thereof. The invention also features nucleic acid molecules comprising at least 25, 40, 50, 100, 150 or 200 nucleotides of nucleic acids 1 to 204 of human TANGO 224 form 1 ORF of SEQ ID NO: 17, or a complement thereof. The invention also features nucleic acid molecules comprising at least 25, 40, 50, 100, 150, 200, 250, 300, 350, 400, 450, 500, 550, 600, 650, 700, 750, 800, 850, 900 or 930 nucleotides of nucleic acids 507 to 1440 of human TANGO 224 form 1 ORF of SEQ ID NO: 17, or a complement thereof.

[0063] The invention features nucleic acid molecules which include a fragment of at least 570, 600, 650, 700, 750, 800, 850, 900, 950, 1000, 1100, 1200, 1300, 1400, 1500, 1600, 1700, 1800, 1900, 2000, 2100, 2150, 2200, 2250, 2300, 2350, 2400, 2450, 2500, 2550, 2600, 2650 or 2680 nucleotides of the nucleotide sequence of human TANGO 224 form 2 ORF of SEQ ID NO: 19, or a complement thereof. The invention also features nucleic acid molecules comprising at least 25, 40, 50, 100, 150 or 200 nucleotides of nucleic acids 1 to 204 of human TANGO 224 form 2 ORF of SEQ ID NO: 19, or a complement thereof. The invention also features nucleic acid molecules comprising at least 25, 40, 50, 100, 150, 200, 250, 300, 350, 400, 450, 500, 550, 600, 650, 700, 750, 800, 850, 900, 950, 1000, 1050, 1100, 1150, 1200, 1250, 1300, 1350, 1400, 1450, 1500 or 1530 nucleotides of nucleic acids 507 to 2038 of human TANGO 224 form 2 ORF of SEQ ID NO: 19, or a complement thereof.

[0064] The invention features nucleic acid molecules of at least 510, 550, 600, 650, 700, 750, 800, 850, 900, 950, 1000, 1050, 1100, 1150, 1200, 1250, 1300, 1350, 1400, 1450, 1500, 1550, 1600, 1650, 1700, 1750, 1800, 1850, 1900, 1950, 2000, 2050, 2100, 2150, 2200, 2250, 2300, 2350, 2400, 2450, 2500, 2550, or 2570 nucleotides of the nucleotide sequence of SEQ ID NO: 31, the nucleotide sequence of a human HtrA-2 cDNA, the nucleotide sequence of the human HtrA-2 cDNA clone of ATCC® Accession No. 98899, or a complement thereof. The invention also features nucleic acid molecules comprising at least 25, 50, 75, 100, 125, 150, 175, 200, 225, 250, 275, 300, 325, 350, 375, 400, 425, 450, 475, 500, 525, 550, 575, 600, 625, 650, 675, 700, 725, 750, 775, 800, 825, 850, 875, 900, or 910 nucleotides of nucleic acids 1 to 925 of SEQ ID NO: 31, or a complement thereof.

[0065] The invention features nucleic acid molecules of at least 380, 400, 450, 500, 550, 600, 650, 700, 750, 800, 850, 900, 950, 1000, 1050, 1100, 1150, 1200, 1250, 1300, 1350, 1400, 1450, 1500, 1550, 1575, or 1595 nucleotides of the nucleotide sequence of SEQ ID NO: 33, the nucleotide sequence of a mouse HtrA-2 cDNA, or a complement thereof. The invention also features nucleic acid molecules comprising at least 25, 50, 75, 100, 125, 150, 175, 200, 225, 250, 275, or 280 nucleotides of nucleic acids 1 to 285 of SEQ ID NO: 33, or a complement thereof.

[0066] The invention features nucleic acid molecules of at least 525, 550, 600, 650, 700, 750, 800, 850, 900, 950, 1000, 1025, 1050, or 1070 nucleotides of the nucleotide sequence of SEQ ID NO: 35, the nucleotide sequence of the human TANGO 221 cDNA clone of ATCC® Accession No. 207044, or a complement thereof. The invention also features nucleic acid molecules comprising at least 25, 50, 75, 100, 125, 150, 175, 200, 225, 250, 275, 300, 325, 350, 375, 400, 425, 450, 475, 500, or 510 nucleotides of nucleic acids 1 to 515 of SEQ ID NO: 35, or a complement thereof.

[0067] The invention features nucleic acid molecules of at least 210, 225, 250, 275, 300, 325, 350, 375, 400, 425, 450, 475, 500, 525, 550, 575, 600, 625, 650, 675, 700, 725, 750, or 761 nucleotides of the nucleotide sequence of SEQ ID NO: 37, the nucleotide sequence of a human TANGO 222 cDNA, the nucleotide sequence of the TANGO 222 cDNA clone of ATCC® Accession No. 207043, or a complement thereof. The invention also features nucleic acid molecules comprising at least 15, 20, 25, 30, or 35 nucleotides of nucleic acids 1 to 40 of SEQ ID NO: 37, or a complement thereof.

[0068] The invention features nucleic acid molecules of at least 680, 700, 750, 800, 850, 900, 950, 1000, 1050, 1100, 1150, 1200, 1250, 1300, 1350, 1400, 1450, 1500, 1550, 1600, 1650, 1675, or 1695 nucleotides of the nucleotide sequence of SEQ ID NO: 39, the nucleotide sequence of the human TANGO 176 cDNA clone of ATCC® Accession No. 207042, or a complement thereof. The invention also features nucleic acid molecules comprising at least 25, 50, 75, 100, 125, 150, 175, 200, 225, 250, 275, 300, 325, 350, 375, 400, 425, 450, 475, 500, 525, 550, 575, 600, 625, or 640 nucleotides of nucleic acids 1 to 645 of SEQ ID NO: 39, or a complement thereof.

[0069] The invention features nucleic acid molecules which include a fragment of at least 810, 850, 900, 950, 1000, 1050, 1100, 1150, 1200, 1250, 1300, 1350, 1400, 1450, 1460, or 1470 nucleotides of the nucleotide sequence of a mouse TANGO 176 ORF, or a complement thereof.

[0070] The invention features nucleic acid molecules of at least 625, 650, 700, 750, 800, 850, 900, 950, 1000, 1100, 1200, 1300, 1400, 1500, 1600, 1700, 1800, 1900, 2000, 2100, 2200, 2300, 2400, 2500, 2600, 2700, 2800, 2900, 3000, 3100, 3200, 3300, 3400, 3500, 3600, or 3677 nucleotides of the nucleotide sequence of SEQ ID NO: 51, the nucleotide sequence of the human TANGO 216 cDNA clone of ATCC® Accession No. 207176, or a complement thereof. The invention also features nucleic acid molecules comprising at least 25, 50, 100, 150, 200, 250, 300, 350, 400, 450, 500, 600, 650, 700, 750, 800, 850, 900, 950, 1000, or 1040 nucleotides of nucleic acids 1695 to 2737 of SEQ ID NO: 51, or a complement thereof, wherein such nucleic acid molecules encode polypeptides or proteins that exhibit at least one structural and/or functional feature of a polypeptide of the invention.

[0071] The invention features nucleic acid molecules of at least 675, 700, 725, 750, 800, 850, 900, 950, 1000, 1100, 1200, 1300, 1400, 1500, 1600, 1700, 1800, 1900, 2000, 2100, 2200, 2300, 2400, 2500, 2600, 2700, 2800, 2900, 3000, 3100, 3200, 3300, 3400, 3500 or 3501 nucleotides of the nucleotide sequence of SEQ ID NO: 53, the nucleotide sequence of a mouse TANGO 216 cDNA, or a complement thereof. The invention features nucleic acid molecules comprising at least 85, 100, 125, 150, 175, 200, 225, 250, 275, 300, 325, 350, 375, 400, 425, 450, 475, 500, 525, 550, 575, 600, 625, 650, 675, 700, 725, 775, 800, 825, 850, 875, 900, 925, 950, 975, 1000, 1025, 1050, 1100, 1125, 1150, 1175, 1200, 1225, 1250, 1275, 1300, 1325, 1350, 1375, 1400, 1425, 1450, 1475, 1500, 1525, 1550, 1575, 1600, 1625, 1650, 1675, 1700, 1725, 1775, 1800, 1825, 1850, 1875, 1900, 1925, 1950, 1975, 2000, 2025, 2050, 2075, 2100, 2125, 2150, 2175, 2200, 2225, 2250, 2275, 2300, 2325, 2350, 2375, 2400 nucleotides of nucleic acids 1 to 2417 of SEQ ID NO: 53, or a complement thereof.

[0072] The invention features nucleic acid molecules of at least 525, 550, 600, 650, 700, 750, 800, 850, 900, 950, or 969 nucleotides of the nucleotide sequence of SEQ ID NO: 55, the nucleotide sequence of a human TANGO 261 cDNA, the nucleotide sequence of the human TANGO 261 cDNA clone of ATCC® Accession No. 207176, or a complement thereof. The invention also features nucleic acid molecules comprising at least 280, 300, 320, 340, 360, 380, 400, 420, 440, 450 nucleotides of nucleic acids 1 to 453 of SEQ ID NO: 55, or a complement thereof.

[0073] The invention features nucleic acid molecules of at least 560, 575, 600, 625, 650, 675, 700, 725, 750, 800, 850, 900, 950, 1000, 1100, 1200, 1300, 1400, 1500, 1600, 1700, or 1713 nucleotides of the nucleotide sequence of SEQ ID NO: 57, the nucleotide sequence of a mouse TANGO 261 cDNA, or a complement thereof. The invention features nucleic acid molecules comprising at least 25 or 30 nucleotides of nucleic acids 1 to 33 of SEQ ID NO: 57, or a complement thereof. The invention features nucleic acid molecules comprising at least 25, 30, 35, 40, 45, 50, 55, 60, 65, 70, 75, 80, 85, 90, 95, 100, 105, 110, 115, 120, 125, 130, 135, 140, 145, 150, 155, 160, 165, or 170 nucleotides of nucleic acids 550 to 725 of SEQ ID NO: 57, or a complement thereof. The invention features nucleic acid molecules comprising at least 25, 30, 35, 40, 45, 50, 55, 60, 65, 70, 75, 80, 85, 90, 95, 100, 105, 110, 115, 120, 125, 130, 135, 140, 145, 150, 155, 160, 165, 170, 175, 180, 185, 190, 195,200, 225, 230, 235, 240, 245, 250, 255, 260, 265, 270, 275, 280, 285, 290, 295, or 300 nucleotides of nucleic acids 1404 to 1713 of SEQ ID NO: 57, or a complement thereof.

[0074] The invention features nucleic acid molecules comprising at least 420, 425, 450, 475, 500, 525, 550, 600, or 650 nucleotides of the nucleotide sequence of the open reading frame of SEQ ID NO: 57, or a complement thereof. The invention also features nucleic acid molecules comprising at least 25, 30, 35, 40, 45, 50, 55 or 60 nucleotides of nucleic acids 1 to 132, or of nucleic acids 549 to 651, of the open reading frame of SEQ ID NO: 57, or a complement thereof.

[0075] The invention features nucleic acid molecules which include a fragment of at least 875, 900, 925, 950, 975, 1000, 1025, 1050, 1075, 1100, 1125, 1150, 1175, 1200, 1225, 1250, 1275, 1300, 1325, 1350, 1375, 1400, 1425, 1450, 1475, 1500, 1525, 1550, 1575, 1600, 1625, 1650, 1675, or 1682 nucleotides of the nucleotide sequence of SEQ ID NO: 59, the nucleotide sequence of the human TANGO 262 cDNA clone of ATCC® Accession No. 207176, or a complement thereof. The invention features nucleic acid molecules comprising at least 25, 50, 100, 150, 200, 250, 300, 350, 400, or 440 nucleotides of nucleic acids 1 to 441 of SEQ ID NO: 59, or a complement thereof. The invention also features nucleic acid molecules comprising at least 25, 50, 100, 150, 200, 250, 300, 350, 400, 450, 500, 525, or 530 nucleotides of nucleic acids 795 to 1329 of SEQ ID NO: 59, the nucleotide sequence of the human TANGO 262 cDNA clone of ATCC® Accession No. 207176, or a complement thereof.

[0076] The invention features nucleic acid molecules of at least 355, 340, 350, 375, 400, 425, 450, 475, 500, 525, 550, 575, 600, 625, 650, or 677 nucleotides of the nucleotide sequence of the open reading frame of SEQ ID NO: 59, the nucleotide sequence of a human TANGO 262 cDNA, or a complement thereof. The invention also features nucleic acid molecules comprising at least 25, 30, 40, 50, 60, 70, 80, 90, 100, 105, 110 or 115 nucleotides of nucleic acids 1 to 120 of the open reading frame of SEQ ID NO: 59, or a complement thereof. The invention also features nucleic acid molecules comprising at least 25, 50, 75, 100, 125, 150, 175, or 200 nucleotides of nucleic acids 474 to 678 of the open reading frame of SEQ ID NO: 59, or a complement thereof.

[0077] The invention features nucleic acid molecules of at least 340, 350, 400, 450, 500, 550, 600, 650, 700, 750, 800, 850, 900, 950, 1000, 1050, 1100, 1150, 1200, 1250, 1300, 1350, 1400 or 1422 nucleotides of the nucleotide sequence of SEQ ID NO: 63, the nucleotide sequence of the human TANGO 266 cDNA clone of ATCC® Accession No. 207176, or a complement thereof. The invention also features nucleic acid molecules comprising at least 25, 50, 100, 125, 150, 175, 200, 225, 250, 275, 300, 325, 350, 375, 400, 425, 450, 475, 500, or 510 nucleotides of nucleic acids 1 to 520 of SEQ ID NO: 63, or a complement thereof.

[0078] The invention features nucleic acid molecules of at least 590, 600, 650, 700, 750, 800, 850, 900, 950, 1000, 1100, 1200, 1300, 1400, 1500, 1600, 1700, 1800, 1900, 2000, 2100, 2200, 2250, 2300, 2350, 2400, 2450, 2500, 2550, 2600, 2650, 2700, 2750, 2800, 2850, 2900, or 2925 nucleotides of the nucleotide sequence of SEQ ID NO: 63, the nucleotide sequence of the human TANGO 266 cDNA clone of ATCC® Accession No. 207176, or a complement thereof. The invention also features nucleic acid molecules comprising at least 25, 50, 100, 125, 150, 175, 200, 225, 250, 275, 300, 325, 375, 400, 425, 450, 475, 500, 525, 550, 575, 600, 625, 650, 675, 700, 725, 750, 775, 800, 825, 850, 875, 900, 925, 950, 975, 1000, 1025, 1050, 1075, 1100, 1125, 1150, 1175, 1200, 1225, 1250, 1275, 1300, 1325, 1375, 1400, 1425, 1450, 1475, 1500, 1525, 1550, 1575, 1600, 1625, 1650, 1675, 1700, 1725, 1750, 1775, 1800, 1825, 1850, 1875, 1900, or 1925 nucleotides of nucleic acids 1 to 1940 of SEQ ID NO: 63, or a complement thereof.

[0079] The invention features nucleic acid molecules which include a fragment of at least 590, 600, 650, 700, 750, 800, 850, 900, 950, 1000, 1100, 1200, 1300, 1400, 1500, 1600, 1700, 1800, 1900, 2000, 2100, 2200, 2250, 2300, or 2333 nucleotides of the nucleotide sequence of the open reading frame of human TANGO 266 of SEQ ID NO: 63, or a complement thereof. The invention also features nucleic acid molecules comprising at least 25, 50, 100, 125, 150, 175, 200, 225, 250, 275, 300, 325, 375, 400, 425, 450, 475, 500, 525, 550, 575, 600, 625, 650, 675, 700, 725, 750, 775, 800, 825, 850, 875, 900, 925, 950, 975, 1000, 1025, 1050, 1075, 1100, 1125, 1150, 1175, 1200, 1225, 1250, 1275, 1300, 1325, 1375, 1400, 1425, 1450, 1475, 1500, 1525, 1550, 1575, 1600, 1625, 1650, 1675, 1700, 1725, 1750, or 1775 nucleotides of nucleic acids 1 to 1780 of the open reading frame of human TANGO 266 of SEQ ID NO: 63, or a complement thereof.

[0080] The invention features nucleic acid molecules of at least 480, 500, 550, 600, 650, 700, 750, 800, 850, 1000, 1100, 1200, 1300, 1400, 1500, 1600, 1700, 1800, 1900, 2000, 2100, 2200, 2300, 2400, 2500, 2600 or 2700 contiguous nucleotides of the nucleotide sequence of SEQ ID NO: 125, the nucleotide sequence of an EpT339 cDNA of ATCC® Accession Number PTA-292, or a complement thereof. The invention also features nucleic acid molecules comprising at least 20, 50, 100, 150, 200, 250, 300, 400, 450, 500, 550, 600, 650,700, 750, 800, 850, 1000, 1100, 1200, 1300, 1400, 1500, 1600, 1700, 1800, 1900, 2000, 2100 contiguous nucleotides of nucleic acids 1 to 2102 of SEQ ID NO: 125, or a complement thereof.

[0081] The invention also features nucleic acid molecules that hybridize under stringent conditions to a nucleic acid molecule having the nucleotide sequence of cDNA or ORF of TANGO 339, or an EpT339 cDNA of ATCC® Accession Number PTA-292, or a complement thereof. In one embodiment, the nucleic acid molecules are at least 480, 500, 550, 600, 650, 700, 750, 800, 1000, 1100, 1200, 1300, 1400, 1500, 1600, 1600, 1700, 1800, 1900, 2000, 2100, 2200, 2300, 2400, 2500, 2600 or 2700 contiguous nucleotides in length and hybridize under stringent conditions to a nucleic acid molecule comprising the nucleotide sequence of TANGO 339, an EpT339 cDNA of ATCC® Accession Number PTA-292, or a complement thereof. In another embodiment, the nucleic acid molecules are at least 20, 50, 100, 150, 200, 250, 300, 350, 400, 450, 500, 550, 600, 650, 700, 750, 800, 900 or 1000 contiguous nucleotides in length and hybridize under stringent conditions to a nucleic acid molecule comprising the nucleotide sequence of TANGO 339 or nucleic acids 1 to 2100 of SEQ ID NO: 125, or a complement thereof.

[0082] The invention also features nucleic acid molecules that hybridize under stringent conditions to a nucleic acid molecule having the nucleotide sequence of TANGO 383, or an EpT383 cDNA of ATCC® Accession Number PTA-295, or a complement thereof. In one embodiment, the nucleic acid molecules are at least 20, 50, 100, 150, 200, 250, 300, 350, 400, 450, 500, 550, or 600 contiguous nucleotides in length and hybridize under stringent conditions to a nucleic acid molecule comprising the nucleotides of SEQ ID NO: 135, or an EpT383 cDNA of ATCC® Accession Number PTA-295, or a complement thereof. Preferably, such nucleic acids hybridize under these conditions to at least a portion of nucleotides 1 to 250 and/or 800 to 1386 of SEQ ID NO: 135.

[0083] The invention features nucleic acid molecules which are at least 80%, 85%, 90%, 95%, or 98% identical to the nucleotide sequence of SEQ ID NO: 147, the nucleotide sequence of the cDNA insert of an EpT499 clone deposited Aug. 5, 1999 with the ATCC® as Accession Number PTA-455, or a complement thereof. The invention features nucleic acid molecules which are at least 75%, 80%, 85%, 90%, 95%, or 98% identical to the nucleotide sequence of SEQ ID NO: 147, or a complement thereof. The invention features nucleic acid molecules which are at least 30%, 35%, 40%, 45%, 50% 55%, 65%, 75%, 85%, 95%, or 98% identical to the nucleotides 301 to 480 of SEQ ID NO: 147, or a complement thereof.

[0084] The invention features nucleic acid molecules which are at least 80%, 85%, 90%, 95%, or 98% identical to the nucleotide sequence of SEQ ID NO: 149, the nucleotide sequence of the cDNA insert of an EpT499 clone deposited Aug. 5, 1999 with the ATCC® as Accession Number PTA-454, or a complement thereof. The invention features nucleic acid molecules which are at least 75%, 80%, 85%, 90%, 95%, or 98% identical to the nucleotide sequence of SEQ ID NO: 149 or a complement thereof. The invention features nucleic acid molecules which are at least 30%, 35%, 40%, 45%, 50% 55%, 65%, 75%, 85%, 95%, or 98% identical to the nucleotides 240 to 344 of SEQ ID NO: 149 or a complement thereof.

[0085] The invention features nucleic acid molecules of at least 550, 600, 650, 700, 750, 800, 850, 1000, 1100, 1200, 1300, 1400, 1500, 1600, 1700, 1800, 1900, 2000 or 2020 contiguous nucleotides of the nucleotide sequence of SEQ ID NO: 141, the nucleotide sequence of an INT307 cDNA of ATCC® Accession Number PTA-455, or a complement thereof. The invention features nucleic acid molecules comprising at least 25, 50, 100, 150, 200, 250, 300, 350, 400, 450, 500, 550, 600 or 645 contiguous nucleotides of nucleic acids 1 to 649 of SEQ ID NO: 141, or a complement thereof. The invention features nucleic acid molecules comprising at least 25, 50, 100, 150, 200, 250 or 300 contiguous nucleotides of nucleic acids 1120 to 1430 of SEQ ID NO: 141, or a complement thereof.

[0086] The invention features nucleic acid molecules comprising at least 475, 500, 550, 600, 650, 700, 750, 800, 850, 900, 950, 1000, 1050 or 1085 contiguous nucleotides of nucleic acids 1 to 1086 of the open reading frame of SEQ ID NO: 141, or a complement thereof. The invention also features nucleic acid molecules comprising at least 25, 50, 100, 150, 200, 250, 300, 350, 400, 450, 500, 550 or 600 contiguous nucleotides of nucleic acids 1 to 604 of the open reading frame of SEQ ID NO: 141, or a complement thereof.

[0087] The invention features nucleic acid molecules of at least 350, 400, 450, 500, 550, 600, 650, 700, 750, 800, 850, 1000, 1100, 1200, 1300, 1400, 1500, 1600, 1700, 1800, 1900, 2000, 2100, 2200, 2300, 2400, 2500, 2600, 2700, 2800, 2900, 3000, 3100, 3200, 3300, 3400, 3500, 3600, 3700, 3800, 3900, 4000, 4100, 4200, 4300, 4400, 4500, 4600, 4700, 4800, 4900, or 5000 contiguous nucleotides of the nucleotide sequence of SEQ ID NO: 145, the nucleotide sequence of an EpT361 cDNA of ATCC® Accession Number PTA-438, or a complement thereof. The invention also features nucleic acid molecules comprising at least 25, 50, 100, 150, 200, 250, 300, 400, 450, 500, 550, 600, 650, 700, 750, 800, 850, 1000, 1100, 1150 or 1170 contiguous nucleotides of nucleic acids 1 to 1176 of SEQ ID NO: 145, or a complement thereof. The invention features nucleic acid molecules comprising at least 25, 50, 100, 150 or 165 contiguous nucleotides of nucleic acids 1653 to 1821 of SEQ ID NO: 145, or a complement thereof. The invention features nucleic acid molecules comprising at least 25, 50, 100, 150, 200, 250, 300, 400, 450, 500, 550, 600, 650, 700, 750, 800, 850, 1000, 1100, 1200, 1300, 1400 or 1450 contiguous nucleotides of nucleic acids 2035 to 3506 of SEQ ID NO: 145, or a complement thereof. The invention also features nucleic acid molecules comprising at least 25, 50, 100, 150, 200, 250, 300, 400, 450, 500, 550, 600, 650, 700, 750, 800, 850, 1000, 1100, 1200, 1300, 1400, 1450 or 1490 contiguous nucleotides of nucleic acids 3564 to 5058 of SEQ ID NO: 145, or a complement thereof.

[0088] The invention features nucleic acid molecules which include a fragment of at least 135, 150, 200, 250, 300, 400, 450, 500, 550, 600, 650, 700, 750, 800, 850, 900, 950, 1000, 1050, 1100, 1150, 1200 or 1250 contiguous nucleotides of the nucleotide sequence of the open reading frame of SEQ ID NO: 145, or a complement thereof. The invention features nucleic acid molecules which include a fragment of at least 25, 50, 100, 150, 200, 250, 300, 400, 450, 500, 550, 600, 650, 700, 750, 800, 850, 900, 950, 1000, 1050, 1100 or 1130 contiguous nucleotides of nucleic acids 1 to 1136 of the open reading frame of SEQ ID NO: 145, or a complement thereof.

[0089] The invention features nucleic acid molecules of at least 500, 525, 550, 600, 650, 700, 750, 800, 850, 1000, or 1100 contiguous nucleotides of the nucleotide sequence of SEQ ID NO: 147, the nucleotide sequence of an EpT499 cDNA of ATCC® Accession Number PTA-455, or a complement thereof. The invention also features nucleic acid molecules comprising at least 25, 50, 100, 150, or 174 contiguous nucleotides of nucleic acids 385 to 559 of SEQ ID NO: 147, or a complement thereof. The invention also features nucleic acid molecules comprising at least 25 contiguous nucleotides of nucleic acids 1072 to 1106 of SEQ ID NO: 147, or a complement thereof.

[0090] The invention features nucleic acid molecules which include a fragment of at least 285, 300, 350, 400, 450, 500, 550, 600, 650, 700, 750 or 760 contiguous nucleotides of the nucleotide sequence of the open reading frame of SEQ ID NO: 147, or a complement thereof. The invention features nucleic acid molecules which include a fragment of at least 25, 50, 100, 150 or 175 contiguous nucleotides of nucleic acids 301 to 480 of the open reading frame of SEQ ID NO: 147, or a complement thereof.

[0091] The invention features nucleic acid molecules of at least 500, 525, 550, 600, 650, 700, 750, 800, 850, 900, 950, 1000, 1050 or 1075 contiguous nucleotides of the nucleotide sequence of SEQ ID NO: 149, the nucleotide sequence of an EpT499 cDNA of ATCC® Accession Number PTA-454, or a complement thereof. The invention also features nucleic acid molecules comprising at least 25, 30, 50, 100, 150 or 175 contiguous nucleotides of nucleic acids 310 to 488 of SEQ ID NO: 149, or a complement thereof.

[0092] The invention also features nucleic acid molecules that hybridize under stringent conditions to a nucleic acid molecule having the nucleotide sequence of SEQ ID NO: 141 or an INT307 cDNA of ATCC® Accession Number PTA-455, or a complement thereof. In one embodiment, the nucleic acid molecules are at least 550, 600, 650, 700, 750, 800, 850, 1000, 1100, 1200, 1300, 1400, 1500, 1600, 1700, 1800, 1900, 2000 or 2020 contiguous nucleotides in length and hybridize under stringent conditions to a nucleic acid molecule comprising the nucleotide sequence of SEQ ID NO: 141, an INT307 cDNA of ATCC® Accession Number PTA-455, or a complement thereof. In another embodiment, the nucleic acid molecules are at least 25, 50, 100, 150, 200, 250, 300, 350, 400, 450, 500, 550, 600 or 645 contiguous nucleotides in length and hybridize under stringent conditions to a nucleic acid molecule comprising nucleic acids 1 to 649 of SEQ ID NO: 141, or a complement thereof. In another embodiment, the nucleic acid molecules are at least 25, 50, 100, 150, 200, 250 or 300 contiguous nucleotides in length and hybridize under stringent conditions to a nucleic acid molecule comprising nucleic acids 1120 to 1430 of SEQ ID NO: 141, or a complement thereof.

[0093] In another embodiment, the nucleic acid molecules are at least 475, 500, 550, 600, 650, 700, 750, 800, 850, 1000, 1050 or 1085 contiguous nucleotides in length and hybridize under stringent conditions to a nucleic acid molecule comprising the nucleotide sequence of the open reading frame of SEQ ID NO: 141, or a complement thereof. In another embodiment, the nucleic acid molecules are at least 25, 50, 100, 150, 200, 250, 300, 350, 400, 450, 500, 550 or 600 contiguous nucleotides in length and hybridize under stringent conditions to a nucleic acid molecule comprising nucleic acids 1 to 604 of the open reading frame of SEQ ID NO: 141, or a complement thereof.

[0094] The invention also features nucleic acid molecules that hybridize under stringent conditions to a nucleic acid molecule having the nucleotide sequence of SEQ ID NO: 145 or an EpT361 cDNA of ATCC® Accession Number PTA-438, or a complement thereof. In one embodiment, the nucleic acid molecules are at least 350, 400, 450, 500, 550, 600, 650, 700, 750, 800, 850, 1000, 1100, 1200, 1300, 1400, 1500, 1600, 1700, 1800, 1900,2000, 2100, 2200, 2300, 2400, 2500, 2600, 2700, 2800, 2900, 3000, 3100, 3200, 3300, 3400, 3500, 3600, 3700, 3800, 3900, 4000, 4100, 4200, 4300, 4400, 4500, 4600, 4700, 4800, 4900 or 5000 contiguous nucleotides in length and hybridize under stringent conditions to a nucleic acid molecule comprising the nucleotide sequence of TANGO 361, an EpT361 cDNA of ATCC® Accession Number PTA-438, or a complement thereof. In another embodiment, the nucleic acid molecules are at least 25, 50, 100, 150, 200, 250, 300, 350, 400, 450, 500, 550, 600, 650, 700, 750, 800, 900, 1000, 1100, 1150 or 1170 contiguous nucleotides in length and hybridize under stringent conditions to a nucleic acid molecule comprising nucleic acids 1 to 1176 of SEQ ID NO: 145, or a complement thereof. In another embodiment, the nucleic acid molecules are at least 25, 50, 100, 150 or 165 contiguous nucleotides in length and hybridize under stringent conditions to a nucleic acid molecule comprising nucleic acids 1653 to 1821 of SEQ ID NO: 145, or a complement thereof. In another embodiment, the nucleic acid molecules are at least 25, 50, 100, 150, 200, 250, 300, 350, 400, 450, 500, 550, 600, 650, 700, 750, 800, 900, 1000, 1100, 1200, 1300, 1400 or 1450 contiguous nucleotides in length and hybridize under stringent conditions to a nucleic acid molecule comprising nucleic acids 2035 to 3506 of SEQ ID NO: 145, or a complement thereof. In another embodiment, the nucleic acid molecules are at least 25, 50, 100, 150, 200, 250, 300, 350, 400, 450, 500, 550, 600, 650, 700, 750, 800, 900, 1000, 1100, 1200, 1300, 1400, 1450 or 1490 contiguous nucleotides in length and hybridize under stringent conditions to a nucleic acid molecule comprising nucleic acids 3564 to 5058 of SEQ ID NO: 145, or a complement thereof.

[0095] In another embodiment, the nucleic acid molecules are at least 135, 150, 200, 250, 300, 350, 400, 450, 500, 550, 600, 650, 700, 750, 800, 900, 1000, 1100, 1200 or 1250 contiguous nucleotides in length and hybridize under stringent conditions to a nucleic acid molecule comprising the nucleotide sequence of the open reading frame of SEQ ID NO: 145, or a complement thereof. In yet another embodiment, the nucleic acid molecules are at least 25, 50, 100, 150, 200, 250, 300, 350, 400, 450, 500, 550, 600, 650, 700, 750, 800, 900, 1000, 1100 or 1130 contiguous nucleotides in length and hybridize under stringent conditions to a nucleic acid molecule comprising nucleic acids 1 to 1136 of the open reading frame of SEQ ID NO: 145, or a complement thereof.

[0096] The invention also features nucleic acid molecules that hybridize under stringent conditions to a nucleic acid molecule having the nucleotide sequence of SEQ ID NO: 147, or an EpT499 form 1, variant 1 cDNA of ATCC® Accession Number PTA-455, or a complement thereof. In one embodiment, the nucleic acid molecules are at least 500, 550, 600, 650, 700, 750, 800, 850, 1000 or 1100 contiguous nucleotides in length and hybridize under stringent conditions to a nucleic acid molecule comprising the nucleotide sequence of SEQ ID NO: 147, an EpT499 cDNA of ATCC® Accession Number PTA-455, or a complement thereof. In another embodiment, the nucleic acid molecules are at least 25, 50, 100, 150 or 175 contiguous nucleotides in length and hybridize under stringent conditions to a nucleic acid molecule comprising nucleic acids 385 to 563 of SEQ ID NO: 147 or a complement thereof. In another embodiment, the nucleic acid molecules are at least 20 or 30 contiguous nucleotides in length and hybridize under stringent conditions to a nucleic acid molecule comprising nucleic acids 1072 to 1106 of SEQ ID NO: 147, or a complement thereof.

[0097] In another embodiment, the nucleic acid molecules are at least 285, 300, 350, 400, 450, 500, 550, 600, 650, 700, 750 or 760 contiguous nucleotides in length and hybridize under stringent conditions to a nucleic acid molecule comprising the nucleotide sequence of the open reading frame of SEQ ID NO: 147, or a complement thereof. In yet another embodiment, the nucleic acid molecules are at least 25, 50, 100, 150 or 175 contiguous nucleotides in length and hybridize under stringent conditions to a nucleic acid molecule comprising nucleic acids 301 to 480 of the open reading frame of SEQ ID NO: 147, or a complement thereof.

[0098] The invention also features nucleic acid molecules that hybridize under stringent conditions to a nucleic acid molecule having the nucleotide sequence of SEQ ID NO: 149, or an EpT499 form 2, variant 3 cDNA of ATCC® Accession Number PTA-454, or a complement thereof. In one embodiment, the nucleic acid molecules are at least 500, 550, 600, 650, 700, 750, 800, 850, 1000, 1050 or 1075 contiguous nucleotides in length and hybridize under stringent conditions to a nucleic acid molecule comprising the nucleotide sequence of SEQ ID NO: 149, an EpT499 cDNA of ATCC® Accession Number PTA-454, or a complement thereof.

[0099] In another embodiment, the nucleic acid molecules are at least 275, 300, 350, 400, 450, 500, 550, 600, 650 or 675 contiguous nucleotides in length and hybridize under stringent conditions to a nucleic acid molecule comprising the nucleotide sequence of the open reading frame of SEQ ID NO: 149, or a complement thereof. In another embodiment, the nucleic acid molecules are at least 25, 50, 100, 150 or 175 contiguous nucleotides in length and hybridize under stringent conditions to a nucleic acid molecule comprising nucleic acids 240 to 344 of the open reading frame of SEQ ID NO: 149, or a complement thereof.

[0100] The invention features nucleic acid molecules of at least 700, 750, 800, 850, 1000, 1050, 1100, 1150, 1200, 1250, 1300, 1350, 1400 or 1450 contiguous nucleotides of the nucleotide sequence of SEQ ID NO: 151, the nucleotide sequence of an EpT315 cDNA of ATCC® PTA-816, or a complement thereof. The invention features nucleic acid molecules comprising at least 25 30, 35, 40 or 45 contiguous nucleotides of nucleic acids 682 to 730 of SEQ ID NO: 151, or a complement thereof.

[0101] The invention features nucleic acid molecules comprising at least 480, 500, 550, 600, 650, 700, 750, 800, 850 or 880 contiguous nucleotides of the nucleotide sequence of the open reading frame of SEQ ID NO: 151, or a complement thereof. The invention also features nucleic acid molecules comprising at least 25, 30, 35, 40 or 45 contiguous nucleotides of nucleic acids 682 to 730 of the open reading frame of SEQ ID NO: 151, or a complement thereof.

[0102] The invention features nucleic acid molecules comprising at least 480, 500, 550, 600, 650, 700, 750, 800 or 820 contiguous nucleotides of the nucleotide sequence of the open reading frame of SEQ ID NO: 153, or a complement thereof. The invention also features nucleic acid molecules comprising at least 25, 30, 35, 40 or 45 contiguous nucleotides of nucleic acids 625 to 673 of the open reading frame of SEQ ID NO: 153, or a complement thereof.

[0103] The invention features nucleic acid molecules of at least 626, 650, 700, 750, 800, 850, 1000, 1100, 1200, 1300, 1400, 1500, 1600, 1700, 1800, 1900,2000,2100,2200, 2300, 2400, 2500, 2600, 2700, 2800, 2900, 3000 or 3042 contiguous nucleotides of the nucleotide sequence of SEQ ID NO: 155, the nucleotide sequence of a clone 330a cDNA of ATCC® PTA-816, or a complement thereof. The invention features nucleic acid molecules comprising at least 25, 50, 100, 150, 200, 250, 300, 350, 400, 450, 500, 550, 600, 650, 700 or 720 contiguous nucleotides of nucleic acids 1090 to 1811 of SEQ ID NO: 155, or a complement thereof. The invention features nucleic acid molecules comprising at least 25, 50, 100, 150, 200, 250, or 260 contiguous nucleotides of nucleic acids 2782 to 3042 of SEQ ID NO: 155, or a complement thereof.

[0104] The invention features nucleic acid molecules comprising at least 626, 650, 700, 750, 800, 850 or 880 contiguous nucleotides of the nucleotide sequence of the open reading frame of SEQ ID NO: 155, or a complement thereof. The invention features nucleic acid molecules comprising at least 25, 50, 100, 150, 200, 250, 300, 350, 400, 450, 500, 550, 600, 650, 700 or 720 contiguous nucleotides of nucleic acids 1088 to 1809 of the open reading frame of SEQ ID NO: 155, or a complement thereof.

[0105] The invention features nucleic acid molecules of at least 751, 800, 850, 1000, 1100, 1200, 1300, 1400, 1500, 1600, 1700, 1800, 1900, 2000, 2100, 2200, 2300, 2400, 2500, 2600, 2700, 2800, 2900, 3000, 3100, 3200, 3300, 3400, 3500, 3600, 3700, 3800 or 3807 contiguous nucleotides of the nucleotide sequence of SEQ ID NO: 157, the nucleotide sequence of a clone 330b cDNA of ATCC® PTA-816, or a complement thereof. The invention features nucleic acid molecules comprising at least 25, 50, 100, 150, or 169 contiguous nucleotides of nucleic acids 1 to 150 of SEQ ID NO: 157, or a complement thereof. The invention features nucleic acid molecules comprising at least 25, 50, 100, 150, 200, 250, 250, 300, 350, 400, 450, 500, 550, 600, 650, 700, 750, 800, 850, 900, 950, 1000 or 1034 contiguous nucleotides of nucleic acids 1090 to 2142 of SEQ ID NO: 157, or a complement thereof. The invention features nucleic acid molecules comprising at least 25, 50, 100, 150 or 199 contiguous nucleotides of nucleic acids 2523 to 2723 of SEQ ID NO: 157.

[0106] The invention features nucleic acid molecules comprising at least 751, 800, 850 or 880 contiguous nucleotides of the nucleotide sequence of the open reading frame of SEQ ID NO: 157, or a complement thereof. The invention features nucleic acid molecules comprising at least 25, 50, 100, 150, or 160 contiguous nucleotides of nucleic acids 1 to 140 of the open reading frame of SEQ ID NO: 157, or a complement thereof. The invention features nucleic acid molecules comprising at least 25, 50, 100, 150, 200, 250, 300, 350, 400 or 440 contiguous nucleotides of nucleic acids 1080 to 1439 of the open reading frame of SEQ ID NO: 157, or a complement thereof.

[0107] The invention features nucleic acid molecules of at least 550, 600, 650, 700, 750, 800, 850, 900, 950, 1000, 1100, 1200, 1300, 1400, 1500, 1600, 1700, 1800, 1900, 2000, 2100, 2200, 2300, 2400, 2500, 2600, 2700, 2800, 2900, 3000, 3100, 3200, 3300, 3400, 3500, 3600, 3700, 3800, 3900, 4000, 4100, 4200, 4300 or 4336 contiguous nucleotides of the nucleotide sequence of SEQ ID NO: 159, the nucleotide sequence of a clone 437 cDNA or a complement thereof. The invention also features nucleic acid molecules comprising at least 25, 50, 100, 150, 200, 250, 300, 350 or 380 contiguous nucleotides of nucleic acids 1 to 385 of SEQ ID NO: 159, or a complement thereof. The invention also features nucleic acid molecules comprising at least 25, 50, 100, 150, 200, 250, 300, 350, 400, 450, 500, 550, 600, 650, 700, 750, 800, 850, 900, 950, 1000, 1050, 1100, 1150 or 1200 contiguous nucleotides of nucleic acids 776 to 1976 of SEQ ID NO: 159, or a complement thereof. The invention also features nucleic acid molecules comprising at least 25, 50, 100, 150, 200, 250, 300, 350, 400, 450, 500, 550, 600, 650, 700, 750, 800, 850, 900, 950, 1000, 1050, 1100, 1150, 1200, 1250, 1300, 1350, 1400 or 1445 contiguous nucleotides of nucleic acids 2889 to 4336 of SEQ ID NO: 159, or a complement thereof.

[0108] The invention features nucleic acid molecules which include a fragment of at least 390, 400, 450, 500, 550, 600, 650, 700, 750, 800, 850, 900, 950, 1000, 1100, 1200, 1300, 1400, 1500, 1600, 1700, 1750 or 1770 contiguous nucleotides of the nucleotide sequence of the open reading frame of SEQ ID NO: 159, or a complement thereof. The invention also features nucleic acid molecules comprising at least 25, 50, 100, 150, 200, 250, 300, 350 or 385 contiguous nucleotides of nucleic acids 1 to 385 of the open reading frame of SEQ ID NO: 159, or a complement thereof. The invention also features nucleic acid molecules comprising at least 25, 50, 100, 150, 200, 250, 300, 350, 400, 450, 500, 550, 600, 650, 700, 750, 800, 850, 900, 950 or 997 contiguous nucleotides of nucleic acids 776 to 1773 of the open reading frame of SEQ ID NO: 159, or a complement thereof.

[0109] The invention features nucleic acid molecules of at least 565, 600, 650, 700, 750, 800, 850, 900, 950, 1000, 1100, 1200, 1300, 1400, 1500, 1600, 1700, 1800, or 1912 contiguous nucleotides of the nucleotide sequence of SEQ ID NO: 161, the nucleotide sequence of a clone 480 cDNA or a complement thereof. The invention also features nucleic acid molecules comprising at least 25, 50, 100, 150, 200, 250, 300, 350, 400, 450, 500, 550, 600, 650, 700, 750, 800, or 835 contiguous nucleotides of nucleic acids 1 to 835 of SEQ ID NO: 161, or a complement thereof. The invention also features nucleic acid molecules comprising at least 25, 50, 100 or 112 contiguous nucleotides of nucleic acids 1231 to 1344 of SEQ ID NO: 161, or a complement thereof.

[0110] The invention features nucleic acid molecules of at least 25, 50, 75, 100, 150, 200, 250, 300, 350, 400, 450, 500, 550 or 579 contiguous nucleotides of the nucleotide sequence of the open reading frame of SEQ ID NO: 161, the nucleotide sequence of a clone 480 cDNA or a complement thereof.

[0111] The invention also features nucleic acid molecules that hybridize under stringent conditions to a nucleic acid molecule having the nucleotide sequence of TANGO 315 or an EpT315 cDNA of ATCC® deposit number PTA-816, or a complement thereof. In one embodiment, the nucleic acid molecules are at least 700, 750, 800, 850, 1000, 1050, 1100, 1150, 1200, 1250, 1300, 1350, 1400 or 1450 contiguous nucleotides in length and hybridize under stringent conditions to a nucleic acid molecule comprising the nucleotide sequence of SEQ ID NO: 151, an EpT315 cDNA of ATCC® deposit number PTA-816, or a complement thereof. In another embodiment, the nucleic acid molecules are at least 25, 30, 35, 40 or 45 contiguous nucleotides in length and hybridize under stringent conditions to a nucleic acid molecule comprising nucleic acids 682 to 730 of SEQ ID NO: 151, or a complement thereof.

[0112] In another embodiment, the nucleic acid molecules are at least 480, 500, 550, 600, 650, 700, 750, 800, 850 or 880 contiguous nucleotides in length and hybridize under stringent conditions to a nucleic acid molecule comprising the nucleotide sequence of the open reading frame of SEQ ID NO: 151, or a complement thereof. In another embodiment, the nucleic acid molecules are at least 25, 30, 35, 40, 50, 100, 150 or 195 contiguous nucleotides in length and hybridize under stringent conditions to a nucleic acid molecule comprising nucleic acids 682 to 730 of the open reading frame of SEQ ID NO: 151, or a complement thereof.

[0113] In another embodiment, the nucleic acid molecules are at least 480, 500, 550, 600, 650, 700, 750, 800, 850 or 860 contiguous nucleotides in length and hybridize under stringent conditions to a nucleic acid molecule comprising the nucleotide sequence of the open reading frame of SEQ ID NO: 153, or a complement thereof. In another embodiment, the nucleic acid molecules are at least 25, 30, 35, 40 or 45 contiguous nucleotides in length and hybridize under stringent conditions to a nucleic acid molecule comprising nucleic acids 625 to 673 of the open reading frame of SEQ ID NO: 153, or a complement thereof.

[0114] The invention also features nucleic acid molecules that hybridize under stringent conditions to a nucleic acid molecule having the nucleotide sequence of the cDNA of TANGO 330 or a Clone 330a cDNA of ATCC® deposit number PTA-816, or a complement thereof. In one embodiment, the nucleic acid molecules are at least 626, 650, 700, 750, 800, 850, 1000, 1100, 1200, 1300, 1400, 1500, 1600, 1700, 1800, 1900, 2000, 2100, 2200, 2300, 2400, 2500, 2600, 2700, 2800, 2900, 3000 or 3042 contiguous nucleotides in length and hybridize under stringent conditions to a nucleic acid molecule comprising the nucleotide sequence of SEQ ID NO: 155, a clone 330a cDNA of ATCC® deposit number PTA-816, or a complement thereof. In another embodiment, the nucleic acid molecules are at least 25, 50, 100, 150, 200, 250, 300, 350, 400, 450, 500, 550, 600, 650, 700 or 720 contiguous nucleotides in length and hybridize under stringent conditions to a nucleic acid molecule comprising nucleic acids 1090 to 1811 of SEQ ID NO: 155, or a complement thereof. In another embodiment, the nucleic acid molecules are at least 25, 50, 100, 150, 200 or 260 contiguous nucleotides in length and hybridize under stringent conditions to a nucleic acid molecule comprising nucleic acids 2782 to 3042 of SEQ ID NO: 155, or a complement thereof

[0115] In another embodiment, the nucleic acid molecules are at least 626, 650, 700, 750, 800, 850, 1000, 1050, 1100, 1200, 1300, 1400, 1500, 1600, 1700, 1800, 1900,2000,2100, 2200, 2300, 2400, 2500, 2600, 2700 or 2802 contiguous nucleotides in length and hybridize under stringent conditions to a nucleic acid molecule comprising the nucleotide sequence of the open reading frame of SEQ ID NO: 155, or a complement thereof. In another embodiment, the nucleic acid molecules are at least 25, 50, 100, 150, 200, 250, 300, 350, 400, 450, 500, 550, 600, 650, 700 or 720 contiguous nucleotides in length and hybridize under stringent conditions to a nucleic acid molecule comprising nucleic acids 1088 to 1809 of the open reading frame of SEQ ID NO: 155, or a complement thereof.

[0116] The invention also features nucleic acid molecules that hybridize under stringent conditions to a nucleic acid molecule having the nucleotide sequence of SEQ ID NO: 157, a clone 330b cDNA of ATCC® deposit number PTA-816, or a complement thereof. In one embodiment, the nucleic acid molecules are at least 751, 800, 850, 1000, 1100, 1200, 1300, 1400, 1500, 1600, 1700, 1800, 1900, 2000, 2100, 2200, 2300, 2400, 2500, 2600, 2700, 2800, 2900, 3000, 3100, 3200, 3300, 3400, 3500, 3600, 3700, 3800 or 3807 contiguous nucleotides in length and hybridize under stringent conditions to a nucleic acid molecule comprising the nucleotide sequence of SEQ ID NO: 157, a clone 330b cDNA of ATCC® deposit number PTA-816, or a complement thereof. In another embodiment, the nucleic acid molecules are at least 25, 50, 100, 150 or 169 contiguous nucleotides in length and hybridize under stringent conditions to a nucleic acid molecule comprising nucleic acids 1 to 150 of SEQ ID NO: 157, or a complement thereof. In another embodiment, the nucleic acid molecules are at least 25, 50, 100, 150, 200, 250, 300, 350, 400, 450, 500, 550, 600, 650, 700, 750, 800, 850, 900, 950, 1000 or 1034 contiguous nucleotides in length and hybridize under stringent conditions to a nucleic acid molecule comprising nucleic acids 1090 to 2142 of SEQ ID NO: 157, or a complement thereof. In another embodiment, the nucleic acid molecules are at least 25, 50, 100, 150 or 199 contiguous nucleotides in length and hybridize under stringent conditions to a nucleic acid molecule comprising nucleic acids 2523 to 2723 of SEQ ID NO: 157, or a complement thereof.

[0117] In another embodiment, the nucleic acid molecules are at least 751, 800, 850, 1000, 1050, 1100, 1200, 1300, 1400 or 1440 contiguous nucleotides in length and hybridize under stringent conditions to a nucleic acid molecule comprising the nucleotide sequence of the open reading frame of SEQ ID NO: 157, or a complement thereof. In another embodiment, the nucleic acid molecules are at least 25, 50, 100, 150 or 160 contiguous nucleotides in length and hybridize under stringent conditions to a nucleic acid molecule comprising nucleic acids 1 to 140 of the open reading frame of SEQ ID NO: 157, or a complement thereof. In another embodiment, the nucleic acid molecules are at least 25, 50, 100, 150, 200, 250, 300, 350, 400, or 440 contiguous nucleotides in length and hybridize under stringent conditions to a nucleic acid molecule comprising nucleic acids 1080 to 1439 of the open reading frame of SEQ ID NO: 157, or a complement thereof.

[0118] In another embodiment, the nucleic acid molecules are at least 25, 50, 100, 150, 200, 250, 300, 350 or 380 contiguous nucleotides in length and hybridize under stringent conditions to a nucleic acid molecule comprising nucleic acids 1 to 385 of TANGO 437, or a complement thereof. In another embodiment, the nucleic acid molecules are at least 25, 50, 100, 150, 200, 250, 300, 350, 400, 450, 500, 550, 600, 650, 700, 750, 800, 850, 900, 950, 1000, 1050, 1100, 1150 or 1200 contiguous nucleotides in length and hybridize under stringent conditions to a nucleic acid molecule comprising nucleic acids 776 to 1976 of SEQ ID NO: 159, or a complement thereof. In another embodiment, the nucleic acid molecules are at least 25, 50, 100, 150, 200, 250, 300, 350, 400, 450, 500, 550, 600, 650, 700, 750, 800, 850, 900, 950, 1000, 1050, 1100, 1150, 1200, 1250, 1300, 1350, 1400 or 1445 contiguous nucleotides in length and hybridize under stringent conditions to a nucleic acid molecule comprising nucleic acids 2887 to 4336 of SEQ ID NO: 159, or a complement thereof.

[0119] The invention also features nucleic acid molecules that hybridize under stringent conditions to a nucleic acid molecule having the nucleotide sequence of TANGO 437-form 2, or a complement thereof. In one embodiment, the nucleic acid molecules are at least 550, 600, 650, 700, 750, 800, 850, 900, 950, 1000, 1100, 1200, 1300, 1400, 1500, 1600, 1700, 1800, 1900, 2000, 2100, 2200, 2300, 2400, 2500, 2600, 2700, 2800, 2900, 3000, 3100, 3200, 3300, 3400, 3500, 3600, or 3700 contiguous nucleotides in length and hybridize under stringent conditions to a nucleic acid molecule comprising the nucleotide sequence of TANGO 437-form 2, or a complement thereof. In another embodiment, the nucleic acid molecules are at least 390, 400, 450, 500, 550, 600, 650, 700, 750, 800, 850, 900, 950, 1000, 1050, 1100, 1150, 1200, 1250, 1300, 1350, 1400, 1450, 1500, 1550, 1600, 1650, 1700, 1750, 1800, 1850, 1900, 1950, 2000, 2050, 2100, 2150, 2200, 2210, or 2220 contiguous nucleotides in length and hybridize under stringent conditions to a nucleic acid molecule comprising the nucleotide sequence of the ORF of TANGO 437-form 2, or a complement thereof.

[0120] In another embodiment, the nucleic acid molecules are at least 390, 400, 450, 500, 550, 600, 650, 700, 750, 800, 850, 900, 950, 1000, 1100, 1200, 1300, 1400, 1500, 1600, 1700, 1750 or 1770 contiguous nucleotides in length and hybridize under stringent conditions to a nucleic acid molecule comprising the nucleotide sequence of the open reading frame of SEQ ID NO: 159, or a complement thereof. In another embodiment, the nucleic acid molecules are at least 25, 50, 100, 150, 200, 250, 300 or 340 contiguous nucleotides in length and hybridize under stringent conditions to a nucleic acid molecule comprising nucleic acids 1 to 385 of the open reading frame of SEQ ID NO: 159, or a complement thereof. In another embodiment, the nucleic acid molecules are at least 25, 50, 100, 150, 200, 250, 300, 350, 400, 450, 500, 550, 600, 650, 700, 750, 800, 850, 900, 950 or 990 contiguous nucleotides in length and hybridize under stringent conditions to a nucleic acid molecule comprising nucleic acids 776 to 1773 of the open reading frame of SEQ ID NO: 159, or a complement thereof.

[0121] In another embodiment, the nucleic acid molecules are at least 25, 50, 100, 150, 200, 250, 300, 350, 400, 450, 500, 550, 600, 650, 700, 750, 800, or 830 contiguous nucleotides of in length and hybridize under stringent conditions to a nucleic acid molecule comprising nucleic acids 1 to 835 of SEQ ID NO: 161, or a complement thereof. In another embodiment, the nucleic acid molecules are at least 25, 50, 100, or 113 contiguous nucleotides in length and hybridize under stringent conditions to a nucleic acid molecule comprising nucleic acids 1231 to 1344 of SEQ ID NO: 161, or a complement thereof.

[0122] In preferred embodiments, the isolated nucleic acid molecules encode a cytoplasmic, transmembrane, or extracellular domain of a polypeptide of the invention.

[0123] In one embodiment, the invention provides an isolated nucleic acid molecule which is antisense to the coding strand of a nucleic acid of the invention.

[0124] Another aspect of the invention provides vectors, e.g., recombinant expression vectors, comprising a nucleic acid molecule of the invention, or modulators thereof. In another embodiment, the invention provides host cells containing such a vector or engineered to contain and/or express a nucleic acid molecule of the invention. The invention also provides methods for producing a polypeptide of the invention by culturing, in a suitable medium, a host cell of the invention containing a recombinant expression vector encoding a polypeptide of the invention such that the polypeptide of the invention is produced.

[0125] Another aspect of this invention features isolated or recombinant proteins and polypeptides of the invention, or modulators thereof. Preferred proteins and polypeptides possess at least one biological activity possessed by the corresponding naturally-occurring human polypeptide. An activity, a biological activity, or a functional activity of a polypeptide or nucleic acid of the invention refers to an activity exerted by a protein, polypeptide or nucleic acid molecule of the invention on a responsive cell as determined in vivo or in vitro, according to standard techniques. Such activities can be a direct activity, such as an association with or an enzymatic activity on a second protein, or an indirect activity, such as a cellular signaling activity mediated by interaction of the protein with a second protein.

[0126] Another aspect of this invention features isolated or recombinant proteins and polypeptides of the invention, or modulators thereof. Preferred proteins and polypeptides possess at least one biological activity possessed by the corresponding naturally-occurring human polypeptide. An activity, a biological activity, and a functional activity of a polypeptide of the invention refers to an activity exerted by a protein or polypeptide of the invention on a responsive cell as determined in vivo, or in vitro, according to standard techniques. Such activities can be a direct activity, such as an association with or an enzymatic activity on a second protein or an indirect activity, such as a cellular signaling activity mediated by interaction of the protein with a second protein. Thus, such activities include, e.g., (1) the ability to form protein-protein interactions with proteins in the signaling pathway of the naturally-occurring polypeptide; (2) the ability to bind a ligand of the naturally-occurring polypeptide; (3) the ability to bind to an intracellular target of the naturally-occurring polypeptide.

[0127] Further activities of polypeptides of the invention include the ability to modulate (this term, as used herein, includes, but is not limited to, “stabilize”, promote, inhibit or disrupt, protein-protein interactions (e.g., homophilic and/or heterophilic)), protein-ligand interactions, e.g., in receptor-ligand recognition, development, differentiation, maturation, proliferation and/or activity of cells function, survival, morphology, proliferation and/or differentiation of cells of tissues in which it is expressed. Additional activities include but are not limited to: (1) the ability to modulate cell surface recognition; (2) the ability to transduce an extracellular signal (e.g., by interacting with a ligand and/or a cell-surface receptor); (3) the ability to modulate a signal transduction pathway; and (4) the ability to modulate intracellular signaling cascades (e.g., signal transduction cascades).

[0128] Other activities of polypeptides of the invention may include, e.g., (1) the ability to modulate cellular proliferation; (2) the ability to modulate cellular differentiation; (3) the ability to modulate chemotaxis and/or migration; and (4) the ability to modulate cell death.

[0129] For HtrA-2 (TANGO 214) or modulators thereof, additional biological activities include, e.g., (1) the ability to modulate growth factor function, e.g., that of insulin-like growth factor (IGF), e.g., IGF-I, IGF-II, by, for example, modulating the availability of growth factors and/or their receptors; (2) the ability to modulate (e.g., inhibit) the activity of a proteolytic enzyme, e.g., a serine protease; and (3) the ability to modulate the function, migration, proliferation (e.g., suppress cell growth), and/or differentiation of cells, e.g. cells in tissues in which it is expressed (see description of expression data below) and, in particular, bone cells such as osteoblasts and osteoclasts, and cartilage cells such as chondrocytes.

[0130] Other activities of HtrA-2 or modulators thereof include: (1) the ability to act as a proteolytic enzyme cleaving either itself (e.g., autocatalysis, e.g., autocatalysis between its own Kazal and serine protease domains) or other substrates; (2) the ability to bind to an inhibitor of proteolytic enzyme activity, e.g., an inhibitor of a serine protease, e.g., α₁-antitrypsin; (3) the ability to modulate the activity of proteins (e.g., TGF-beta family members) in the activin/inhibin growth factor system; and (4) the ability to perform one or more of the functions of human HtrA described, for example, in Hu et al. (1998) J. Biol. Chem. 273(51):34406-34412, the contents of which are incorporated herein by reference.

[0131] Other activities of HtrA-2 or modulators thereof include: (1) the ability to modulate the function of a normal or mutated presenilin protein (e.g., presenilin-1 (PS-1) or presenilin-2 (PS-2)); and (2) the ability to perform a function of the human serine protease PSP-1, described in EP 828 003, the contents of which are incorporated herein by reference.

[0132] Still other activities of HtrA-2 or modulators thereof include: (1) the ability to modulate protein degradation, e.g., degradation of denatured and/or misfolded proteins; (2) the ability to act as a chaperone protein, e.g., to renature misfolded proteins and help to restore their function; (3) the ability to interact with (e.g., bind to) the normal or mutated gene product of a human presenilin gene (e.g., human presenilin 1 (PS-1), e.g., mutant PS-1 TM16TM2 loop domain as described in PCT Publication Number WO 98/01549, published Jan. 15, 1998); (4) the ability to interact with (e.g., bind to) a protein expressed in brain; (5) the ability to modulate a neurological function; (6) the ability to interact with (e.g. bind to) a protein containing the following consensus sequence: Xaa-Ser/Thr-Xaa-Val-COO-, where Xaa is any amino acid, Ser is Serine, Thr is Threonine, Val is Valine (which can be substituted with other hydrophobic residues), and COO- is the protein C terminus; and (7) the ability to modulate production and secretion of prostaglandin.

[0133] For TANGO 221 or modulators thereof, additional biological activities include, e.g., the ability to interact with a TANGO 221 receptor. Other activities include the ability to modulate function, survival, morphology, proliferation and/or differentiation of cells of tissues in which it is expressed (e.g., cells of adipose tissue, breast tissue, and fetal liver and spleen tissues). With regard to adipose tissue, examples of biological activities of TANGO 221 include the ability to modulate synthesis, storage, and release of lipids, and to modulate the conversion of stored chemical energy into heat.

[0134] For TANGO 222 or modulators thereof, additional biological activities include, e.g., the ability to interact with a TANGO 222 receptor. Other activities include: (1) the ability to modulate function, survival, morphology, proliferation and/or differentiation of cells of tissues in which it is expressed (e.g., cells of adipose tissue). In adipose tissue, for example, TANGO 222 biological activities include the ability to modulate synthesis, storage, and release of lipids, and to modulate the conversion of stored chemical energy into heat.

[0135] For TANGO 176 or modulators thereof, additional biological activities include, e.g., (1) the ability to interact with a TANGO 176 receptor; (2) the ability to act as a serine carboxypeptidase, e.g., act as a serine carboxypeptidase at an acidic lysosomal pH (e.g., between pH 2 and pH 6); (3) the ability to act as a deamidase, e.g., act as a deamidase at a neutral pH (e.g., between pH 7 and pH 7.5); and (4) the ability to perform a function of cathepsin A. Other activities include the ability to modulate function, survival, morphology, proliferation and/or differentiation of cells of tissues in which it is expressed (e.g., cells of the pituitary gland).

[0136] For TANGO 201 or modulators thereof, additional biological activities include, e.g., the ability to interact with a TANGO 201 receptor. Other activities include (1) the ability to modulate function, survival, morphology, proliferation and/or differentiation of cells of tissues in which it is expressed (e.g., pancreas, adrenal medulla, thyroid, adrenal cortex, testis, stomach, heart, brain, placenta, lung, liver, kidney, skeletal muscle, or small intestine); and (2) the ability to function in the amplification of cellular oncogenes.

[0137] For TANGO 223 or modulators thereof, additional biological activities include, e.g., the ability to interact with a TANGO 223 receptor. Other activities include the ability to modulate function, survival, morphology, proliferation and/or differentiation of cells of tissues in which it is expressed (e.g., heart, brain, liver, kidney, testis, prostate, ovary, colon, peripheral blood leukocytes, and the small intestine).

[0138] For TANGO 253 or modulators thereof, additional biological activities include, e.g., (1) the ability to modulate the development, differentiation, maturation, proliferation and/or activity of cells of the central nervous system such as neurons, glial cells (e.g., astrocytes and oligodendrocytes), and Schwann cells; (2) the ability to modulate the development of central nervous system; (3) the ability to modulate the development, differentiation, maturation, proliferation and/or activity of renal cells; (4) the ability to modulate the development, differentiation, maturation, proliferation and/or activity of testicle cells, such as germ cells, leydig cells and Sertoli cells; (5) the ability to modulate the development, differentiation, maturation, proliferation and/or activity of ovarian cells; (6) ability to modulate cell-cell interactions and/or cell-extracellular matrix interactions; (7) the ability to modulate the host immune response, e.g., by modulating one or more elements in the serum complement cascade; (8) the ability to modulate the proliferation, differentiation and/or activity of cells that form blood vessels and coronary tissue (e.g., coronary smooth muscle cells and/or blood vessel endothelial cells); and (9) the ability to modulate adipocyte function.

[0139] For TANGO 257 or modulators thereof, additional biological activities include, e.g., (1) the ability to modulate the development, differentiation, proliferation and/or activity of neuronal cells, e.g., olfactory neurons (2) the ability to modulate the development, differentiation, proliferation and/or activity of pulmonary system cells, e,g., lung cell types; (4) the ability to modulate the development, differentiation, maturation, proliferation and/or activity of bone cells such as osteocytes, osteoblasts and osteoclasts (e.g., the ability promote the development of osteocytes); (5) the ability to modulate the development of bone structures such as the skull, the basisphenoid bone, the upper and lower incisor teeth, the vertebral column, the sternum, the scapula, and the femur during embryogenesis; (6) the ability to modulate the development, differentiation, maturation, proliferation and/or activity of renal cells; (7) the ability to modulate the development, differentiation, maturation, proliferation and/or activity of intestinal cells such as M cells; (8) the ability to modulate cell-cell interactions and/or cell-extracellular matrix interactions, e.g., neuronal cell-extracellular matrix interactions; and (9) the ability to modulate the development, differentiation, proliferation and/or activity of cells that form blood vessels and coronary tissue, e.g., coronary smooth muscle cells and/or blood vessel endothelial cells.

[0140] For INTERCEPT 258 or modulators thereof, additional biological activities include, e.g., (1) the ability to modulate the host immune response; (2) the ability to modulate the development, differentiation, maturation, proliferation and/or activity of pulmonary system cells such as bronchial cells; (3) the ability to modulate the development, differentiation, maturation, proliferation and/or activity of renal cells; (4) the ability to modulate the development, differentiation, maturation, proliferation and/or activity of cardiac cells such cardiac myocytes; (5) the ability to modulate the development of brown fat (e.g., the promotion of the development of brown fat); (6) the ability to modulate the development, differentiation, maturation, proliferation and/or activity of endothelial cells; (7) the ability to modulate cell proliferation, e.g., gastrointestinal tract epithelial cell proliferation; and (8) the ability to modulate thrombosis (e.g., the ability to facilitate the removal of blood clots) and/or vascularization (e.g., the promotion of vascularization).

[0141] For TANGO 204 or modulators thereof, additional biological activities include, e.g., the ability to interact with a TANGO 204 receptor. TANGO 204 biological activities can include the ability to act as a protease inhibitor.

[0142] For TANGO 206 or modulators thereof, additional biological activities include, e.g., the ability to interact with a TANGO 206 receptor. TANGO 206 biological activities can include the ability to modulate cell migration and acid secretion by gastric mucosal tissue.

[0143] For TANGO 209 or modulators thereof, additional biological activities include, e.g., the ability to interact with a TANGO 209 receptor. Other activities include the ability to modulate function, survival, morphology, proliferation and/or differentiation of cells of tissues in which it is expressed (e.g., cells of the pituitary gland). TANGO 209 biological activities can include the ability to modulate the availability of growth factors, the ability to modulate cell migration, and the ability to modulate embryonic growth.

[0144] For TANGO 244 or modulators thereof, additional biological activities include, e.g., the ability to interact with a TANGO 244 receptor. Other activities include the ability to modulate function, survival, morphology, proliferation and/or differentiation of cells of tissues in which it is expressed.

[0145] For TANGO 246 or modulators thereof, additional biological activities include, e.g., the ability to interact with a TANGO 246 receptor. TANGO 246 biological activities can include the ability to act as a small molecule transporter or a cell cycle regulator.

[0146] For TANGO 275 or modulators thereof, additional biological activities include, e.g., the ability to interact with a TANGO 275 receptor. Other activities include the ability to modulate function, survival, morphology, proliferation and/or differentiation of cells of tissues in which it is expressed (e.g., cells of the pituitary gland). TANGO 275 biological activities can include: (1) the ability to act as a TGF-β binding protein; (2) the ability to facilitate the normal assembly and secretion of large latent complexes containing TGF-β; (3) the ability to target latent TGF-β to connective tissue; (4) the ability to target latent TGF-β to the cell surface; (5) the ability to modulate bone formation, renewal, or remodeling; and (6) the ability to modulate the development or function of the heart, cardiovascular system, brain, placenta, liver, skeletal muscle, kidney or pancreas.

[0147] For MANGO 245 or modulators thereof, additional biological activities include, e.g., the ability to interact with a MANGO 245 receptor. Other activities include the ability to modulate function, survival, morphology, proliferation and/or differentiation of cells of tissues in which it is expressed, e.g., the central nervous system, and the ability to modulate the cellular functions of cells of the nervous system (neurons and glial cells), and the ability to act as a modulator of complement function.

[0148] For INTERCEPT 340 or modulators thereof, additional biological activities include, e.g., (1) the ability to interact with an INTERCEPT 340 receptor, e.g., a cell surface receptor (e.g., an integrin); (2) the ability to modulate the activity of an intracellular molecule that participates in a signal transduction pathway, e.g., an intracellular molecule in the integrin signaling (e.g., a cdk2 inhibitor); (3) the ability to assemble into fibrils; (4) the ability to strengthen and organize the extracellular matrix; (5) the ability to modulate the shape of tissues and cells; (6) the ability to interact with (e.g., bind to) components of the extracellular matrix; and (7) the ability to modulate cell migration. Other activities include the ability to modulate function, survival, morphology, migration, proliferation and/or differentiation of cells of tissues in which it is expressed (e.g., splenic cells). For example, additional biological activities of INTERCEPT 340 include: (1) the ability to modulate splenic cell activity; (2) the ability to modulate skeletal morphogenesis; and/or (3) the ability to modulate smooth muscle cell proliferation and differentiation.

[0149] For MANGO 003 or modulators thereof, additional biological activities include, e.g., (1) the ability to interact with a MANGO 003 receptor, e.g., a cell surface receptor; and (2) the ability to modulate signal transmission at a chemical synapse. Other activities include the ability to modulate function, survival, morphology, proliferation and/or differentiation of cells of tissues in which it is expressed (e.g., thyroid, liver, skeletal muscle, kidney, heart, lung, testis and brain). For example, the activities of MANGO 003 can include modulation of endocrine, hepatic, skeletal muscular, renal, cardiovascular, reproductive and/or brain function.

[0150] For MANGO 347 or modulators thereof, additional biological activities include, e.g., (1) the ability to interact with a MANGO 347 receptor; and (2) the ability to modulate a developmental process, e.g., morphogenesis, cellular migration, adhesion, proliferation, differentiation, and/or survival. Other activities include the ability to modulate function, survival, morphology, proliferation and/or differentiation of cells of tissues in which it is expressed (e.g., brain cells). For example, the activities of MANGO 347 can include modulation of neural (e.g., CNS) function.

[0151] For TANGO 272 or modulators thereof, additional biological activities include, e.g., (1) the ability to interact with a TANGO 272 receptor, e.g., a cell surface receptor (e.g., an integrin); (2) the ability to modulate cell attachment; (3) the ability to modulate cell fate; and (4) the ability to modulate tissue repair and/or wound healing. Other activities include the ability to modulate function, survival, morphology, proliferation and/or differentiation of cells of tissues in which it is expressed (e.g., micro vascular endothelial cells). For example, the activities of TANGO 272 can include modulation of cardiovascular function.

[0152] For TANGO 295 or modulators thereof, additional biological activities include, e.g., (1) the ability to interact with (e.g., bind to) a nucleic acid; and (2) the ability to elicit pyrimidine-specific endonuclease activity. Other activities include the ability to modulate function, survival, morphology, proliferation and/or differentiation of cells of tissues in which it is expressed (e.g., mammary epithelium).

[0153] For TANGO 354 or modulators thereof, additional biological activities include, e.g., the ability to modulate function, survival, morphology, proliferation and/or differentiation of cells of tissues in which it is expressed (e.g., hematopoietic tissues). For example, TANGO 354 biological activities can further include: (1) regulation of hematopoietic; (2) modulation (e.g., increasing or decreasing) of homeostasis; (3) modulation of an inflammatory response; (4) modulation of neoplastic growth, e.g., inhibition of tumor growth; and (5) modulation of thrombolysis.

[0154] For TANGO 378 or modulators thereof, additional biological activities include, e.g., the ability to modulate a signal transduction pathway (e.g., adenylate cyclase, or phosphatidylinositol 4,5-bisphosphate (PIP₂), inositol 1,4,5-triphosphate (IP₃)). Other activities include the ability to modulate function, survival, morphology, proliferation and/or differentiation of cells of tissues in which it is expressed (e.g., natural killer cells). For example, TANGO 378 biological activities can further include the ability to modulate an immune response in a subject, for example, (1) by modulating immune cytotoxic responses against pathogenic organisms, e.g., viruses, bacteria, and parasites; (2) by modulating organ rejection after transplantation; and (3) by modulating immune recognition and lysis of normal and malignant cells.

[0155] For TANGO 339 or modulators thereof, additional biological activities include, e.g., (1) the ability to modulate the development, differentiation, proliferation and/or activity of immune cells (e.g., B-lymphocyte function); (2) the ability to modulate the development and progression of cancer (e.g. lymphomas and/or melanoma-associated cancer); (3) the ability to modulate hematopoietic processes; (4) the ability to modulate platelet activation and aggregation; (5) the ability to modulate intercellular signaling (e.g., in the nervous system); (6) the ability modulate the development, differentiation, proliferation and/or activity of neuronal cells and glial cells (e.g., oligodendrocytes and astrocytes); (7) the ability to modulate the development, differentiation and activity of eye structures, such as the retina (e.g., the ability to modulate photoreceptor disk morphogenesis); and (8) the ability to modulate the development of organs, tissues and/or cells in an embryo and/or fetus.

[0156] For TANGO 358 or modulators thereof, additional biological activities include, e.g., (1) the ability to modulate development, differentiation, maturation, proliferation and/or activity of immune cells such as thymocytes, e.g., T-lymphocytes; (2) the ability to modulate the host immune response; and (3) the ability to modulate intercellular signaling (e.g., in the immune system).

[0157] For TANGO 365 or modulators thereof, additional biological activities include, e.g., the ability to modulate, protein-protein interactions (e.g., homophilic and/or heterophilic), and protein-ligand interactions, e.g., in TANGO 365 receptor-ligand recognition.

[0158] For TANGO 368 or modulators thereof, additional biological activities include, e.g., the ability to modulate, protein-protein interactions (e.g., homophilic and/or heterophilic), and protein-ligand interactions, e.g., in TANGO 368 receptor-ligand recognition.

[0159] For TANGO 369 or modulators thereof, additional biological activities include, e.g., (1) the ability to modulate development, differentiation, proliferation and/or activity of cells, such as immune cells, e.g., natural killer cells; (2) the ability to modulate the host immune response; (3) the ability to modulate intercellular signaling (e.g., in the immune system); and (4) the ability to modulate, protein-protein interactions (e.g., homophilic and/or heterophilic), and protein-ligand interactions, e.g., in TANGO 369 receptor-ligand recognition.

[0160] For TANGO 383 or modulators thereof, additional biological activities include, e.g., ability to modulate cell-cell interactions and/or cell-extracellular matrix interactions.

[0161] For MANGO 346 or modulators thereof, additional biological activities include, e.g., ability to modulate cell-cell interactions and/or cell-extracellular matrix interactions.

[0162] For MANGO 349 or modulators thereof, additional biological activities include, e.g., (1) the ability to modulate the proliferation, differentiation and/or activity of neural cells; and (2) the ability to modulate intracellular signaling cascades (e.g., signal transduction cascades).

[0163] For INTERCEPT 307 or modulators thereof, additional biological activities include, e.g., (1) the ability to modulate the development, differentiation, morphology, migration or chemotaxis, proliferation and/or activity of immune cells (e.g., T-lymphocyte function); (2) the ability to modulate the development and progression of cell proliferative disorders such as cancer (e.g., prostate cancer); (3) the ability to modulate hematopoietic processes; (4) the ability to modulate the proliferation, differentiation, and/or function of prostate cells; (5) the ability to modulate infections, e.g., infections mediated by eosinophil granule release; and (6) the ability to modulate the function, e.g., activation, of eosinophils.

[0164] For MANGO 511 or modulators thereof, additional biological activities include, e.g., (1) the ability to modulate the development, differentiation, morphology, migration or chemotaxis, proliferation and/or activity of immune cells (e.g., B-lymphocytes and monocytes); (2) the ability to modulate hematopoietic processes; (3) the ability to modulate MHC class I recognition and binding; (4) the ability to modulate ligand-receptor interactions in proteins with immunoglobulin domains; (5) the ability to modulate immunoglobulin binding to antigens; and (6) the ability to modulate lymphocyte selection (such as modulation of B-cell receptor or T-cell receptor stimulation in developing lymphocytes, e.g., through modulation of antigen interaction with immunoglobulin domains of the receptors).

[0165] For TANGO 361 or modulators thereof, additional biological activities include, e.g., (1) the ability to modulate the development, differentiation, morphology, migration or chemotaxis, proliferation and/or activity of prostate cells (e.g., prostate epithelial cells) or adipocytes; (2) the ability to modulate the development and progression of cell proliferative disorders such as cancer (e.g. prostate or prostate-associated cancer); (3) the ability to act as a protease (e.g., serine protease) and/or modulate protease (e.g., serine protease) activities, such as serine protease activity involved in platelet function, (e.g., activation and aggregation), serine protease activity involved in progression of Alzheimer's disease (e.g., formation of Alzheimer's plaques), or serine protease activity involved in activation of the complement system (e.g., C3b cleavage); (4) the ability to modulate intercellular signaling (e.g., in the prostate); (5) the ability to modulate suppression of infectious diseases or cancer (e.g., bacteria, viruses, parasites, or neoplastic cells); (6) the ability to modulate autoimmunity (e.g., as associated with multiple sclerosis, psoriasis, arthritis, lupus); (7) the ability to modulate transplant rejections (e.g., graft rejections, or allograft rejections); (8) the ability to modulate carbohydrate binding; and (9) the ability to modulate systemic energy balance.

[0166] For TANGO 499 or modulators thereof, additional biological activities include, e.g., (1) the ability to modulate the development, differentiation, morphology, migration or chemotaxis, proliferation, survival and/or activity of neurons, (e.g. peripheral neurons and/or central neurons), glial cells, (e.g., oligodendrocytes or astrocytes) or endocrine cells (e.g., pituitary cells or pineal gland cells); (2) the ability to modulate the development and progression of cell proliferative disorders such as cancer (e.g., glial associated cancers such as glioblastoma) or neural associated cancer; (3) the ability to modulate intercellular signaling (e.g., in the nervous system); (4) the ability to modulate the development of neural organs and tissues; (5) the ability to modulate riboflavin delivery to the embryo; and (6) the ability to modulate the development of an embryo and/or fetal development.

[0167] For TANGO 315 or modulators thereof, additional biological activities include, e.g., (1) the ability to track and/or modulate the development, differentiation, morphology, migration or chemotaxis, proliferation and/or activity of immune cells (e.g., natural killer cell function); (2) the ability to modulate the development and progression of cell proliferative disorders such as cancer (e.g., myeloid leukemia); (3) the ability to track and/or modulate hematopoietic processes; (4) the ability to track and/or modulate the development, proliferation, activity and function of adipocytes; (5) the ability to track and/or modulate neuroendrocrine function and activity, e.g., neuroendrocrine secretion; (6) the ability to modulate energy metabolism; (7) the ability to modulate appetite (e.g., obesity or cachexia); and (8) the ability to track and/or modulate embryonic development.

[0168] For TANGO 330 or modulators thereof, additional biological activities include, e.g., (1) the ability to track and/or modulate the development, differentiation, morphology, migration or chemotaxis, proliferation, survival, activity and/or function of neurons, (e.g., peripheral neurons and/or central neurons); (2) the ability to track and/or modulate the development, differentiation, morphology, migration or chemotaxis, proliferation, survival, activity and/or function of glial cells, (e.g., oligodendrocytes or astrocytes); (3) the ability to track and/or modulate the development, differentiation, morphology, migration or chemotaxis, proliferation, survival, activity and/or function of endocrine cells (e.g., adrenal gland cells neural organs or tissues or endocrine organs or tissues); (4) the ability to track and/or modulate intercellular signaling (e.g., in the nervous system); and (5) the ability to track and/or modulate cell cycle progression.

[0169] For TANGO 437 or modulators thereof, additional biological activities include, e.g., (1) the ability to track and/or modulate the development, differentiation, morphology, migration or chemotaxis, proliferation, activity and/or function of immune cells (e.g., B cells, T cells and monocytes); (2) the ability to track and/or modulate hematopoietic processes; and (3) the ability to track and/or modulate ion transport (e.g., sodium, calcium or potassium transport).

[0170] For TANGO 480 or modulators thereof, additional biological activities include, e.g., the ability to track and/or modulate the development, differentiation, morphology, migration or chemotaxis, proliferation, activity and/or function of keratinocytes.

[0171] In one embodiment, a polypeptide of the invention has an amino acid sequence sufficiently identical to an identified domain of a polypeptide of the invention. As used herein, the term “sufficiently identical” refers to a first amino acid or nucleotide sequence which contains a sufficient or minimum number of identical or equivalent (e.g., with a similar side chain) amino acid residues or nucleotides to a second amino acid or nucleotide sequence such that the first and second amino acid or nucleotide sequences have or encode a common structural domain and/or common functional activity. For example, amino acid or nucleotide sequences which contain or encode a common structural domain having about 60% identity, preferably about 65% identity, more preferably about 75%, 85%, 95%, 98% or more identity are defined herein as sufficiently identical.

[0172] In one embodiment, the isolated polypeptides of the invention include at least one or more of the following domains: a signal sequence, an extracellular domain, a transmembrane domain and an intracellular or cytoplasmic domain.

[0173] In another embodiment, the isolated polypeptide of the invention lacks both a transmembrane and cytoplasmic domain. In yet another embodiment, a polypeptide of the invention lacks both a transmembrane and a cytoplasmic domain and is soluble under physiological conditions. In yet another embodiment, a polypeptide of the invention is fused to either heterologous sequences, or is fused in two or more repeats of a domain, e.g., binding or enzymatic, and is soluble under physiological conditions.

[0174] The polypeptides of the present invention, or biologically active portions thereof, can be operably linked to a heterologous amino acid sequence to form fusion proteins. The invention further features antibody substances that specifically bind a polypeptide of the invention, such as monoclonal or polyclonal antibodies, antibody fragments, and single-chain antibodies. In addition, the polypeptides of the invention or biologically active portions thereof can be incorporated into pharmaceutical compositions, which optionally include pharmaceutically acceptable carriers. These antibody substances can be made, for example, by providing the polypeptide of the invention to an immuno-competent vertebrate and thereafter harvesting blood or serum from the vertebrate.

[0175] In another aspect, the present invention provides methods for detecting the presence, activity or expression of a polypeptide of the invention in a biological sample by contacting the biological sample with an agent capable of detecting an indicator of the presence, activity or expression such that the presence activity or expression of a polypeptide of the invention is detected in the biological sample.

[0176] In another aspect, the invention provides methods for modulating activity of a polypeptide of the invention comprising contacting a cell with an agent that modulates (e.g., inhibits or stimulates) the activity or expression of a polypeptide of the invention such that activity or expression in the cell is modulated. In one embodiment, the agent is an antibody that specifically binds to a polypeptide of the invention. In another embodiment, the agent is a fragment of a polypeptide of the invention or a nucleic acid molecule encoding such a polypeptide fragment.

[0177] In another embodiment, the agent modulates expression of a polypeptide of the invention by modulating transcription, splicing, or translation of an mRNA encoding a polypeptide of the invention. In yet another embodiment, the agent is a nucleic acid molecule having a nucleotide sequence that is antisense to the coding strand of an mRNA encoding a polypeptide of the invention.

[0178] The present invention also provides methods to treat a subject having a disorder characterized by aberrant activity of a polypeptide of the invention or aberrant expression of a nucleic acid of the invention by administering an agent which is a modulator of the activity of a polypeptide of the invention or a modulator of the expression of a nucleic acid of the invention to the subject. In one embodiment, the modulator is a protein of the invention. In another embodiment, the modulator is a nucleic acid of the invention. In other embodiments, the modulator is a polypeptide (e.g., an antibody or a fragment of a polypeptide of the invention), a peptidomimetic, or other small molecule (e.g., a small organic molecule).

[0179] The present invention also provides diagnostic assays for identifying the presence or absence of a genetic lesion or mutation characterized by at least one of: (i) aberrant modification or mutation of a gene encoding a polypeptide of the invention, (ii) mis-regulation of a gene encoding a polypeptide of the invention, and (iii) aberrant post-translational modification of the invention wherein a wild-type form of the gene encodes a protein having the activity of the polypeptide of the invention.

[0180] In another aspect, the invention provides a method for identifying a compound that binds to or modulates the activity of a polypeptide of the invention. In general, such methods entail measuring a biological activity of the polypeptide in the presence and absence of a test compound and identifying those compounds which alter the activity of the polypeptide.

[0181] The invention also features methods for identifying a compound which modulates the expression of a polypeptide or nucleic acid of the invention by measuring the expression of the polypeptide or nucleic acid in the presence and absence of the compound.

[0182] Other features and advantages of the invention will be apparent from the following detailed description and claims.

### BRIEF DESCRIPTION OF THE DRAWINGS

[0183] FIGS. 1A-1D depicts a partial cDNA sequence and predicted partial amino acid sequence of mouse TANGO 136 (SEQ ID NO: 2). The open reading frame extends from nucleotide 89 to nucleotide 1813 of SEQ ID NO: 1. In this and other sequence depictions described herein the open reading frame of the cDNA is indicated by nucleotide triplets, above which the amino acid sequence is listed.

[0184] FIG. 2 depicts a hydropathy plot of a portion of mouse TANGO 136. Relatively hydrophobic residues are above the horizontal line, and relatively hydrophilic residues are below the horizontal line. The cysteine residues (cys) and potential N-glycosylation sites (Ngly) are indicated by short vertical lines just below the hydropathy trace. A dashed vertical line separates the signal sequence on the left from the mature protein on the right.

[0185] FIGS. 3A-3E depicts the cDNA sequence and predicted amino acid sequence of human TANGO 136 (SEQ ID NO: 4). The open reading frame of extends from nucleotide 541 to 2679 of SEQ ID NO: 3.

[0186] FIG. 4 depicts a hydropathy plot of human TANGO 136, the details of which are described herein.

[0187] FIGS. 5A-5B depicts an alignment of the amino acid sequences of mouse TANGO 136 (partial sequence, human TANGO 136, human LRp105 and rat LRp105).

[0188] FIGS. 6A-6E depicts an alignment of the nucleic acid sequences of mouse TANGO 136 (partial sequence) and human TANGO 136.

[0189] FIGS. 7A-7B depicts an alignment of the amino acid sequences of mouse TANGO 136 (partial sequence; upper sequence) and human TANGO 136 (lower sequence).

[0190] FIG. 8 depicts alignments of the CUB-like domains of mouse TANGO 136 (lower sequence) with a consensus CUB domain (upper sequence). In these alignments an uppercase letter between the two sequences indicates an exact match, and a “+” indicates a similarity.

[0191] FIG. 9 depicts alignments of the CUB-like domains of human TANGO 136 (lower sequence) with a consensus CUB domain (upper sequence). In these alignments an uppercase letter between the two sequences indicates an exact match, and a “+” indicates a similarity.

[0192] FIG. 10 depicts alignments of the LDL class A domains of human TANGO 136 (lower sequence) with a consensus LDL class A domain (upper sequence). In these alignments an uppercase letter between the two sequences indicates an exact match, and a “+” indicates a similarity.

[0193] FIGS. 11A-11D depicts the cDNA sequence of human TANGO 128 and predicted amino acid sequence of TANGO 128 (SEQ ID NO: 6). The open reading frame extends from nucleotide 288 to 1322 of SEQ ID NO: 5.

[0194] FIGS. 12A-12B depicts the cDNA sequence of human TANGO 140-1 and predicted amino acid sequence of TANGO 140-1 (SEQ ID NO: 8). The open reading frame extends from nucleotide 2 to 622 of SEQ ID NO: 7.

[0195] FIGS. 13A-13C depicts the cDNA sequence of human TANGO 140-2 and predicted amino acid sequence of TANGO 140-2 (SEQ ID NO: 10). The open reading frame extends from nucleotide 1 to 594 of SEQ ID NO: 9.

[0196] FIGS. 14A-14C depicts the cDNA sequence of human TANGO 197 and predicted amino acid sequence of TANGO 197 (SEQ ID NO: 12). The open reading frame extends from nucleotide 213 to 1211 of SEQ ID NO: 11.

[0197] FIGS. 15A-15E depicts the cDNA sequence of human TANGO 212 and predicted amino acid sequence of TANGO 212 (SEQ ID NO: 14). The open reading frame extends from nucleotide 269 to 1927 of SEQ ID NO: 13.

[0198] FIGS. 16A-16C depicts the cDNA sequence of human TANGO 213 and predicted amino acid sequence of TANGO 213 (SEQ ID NO: 16). The open reading frame extends from nucleotide 58 to 870 of SEQ ID NO: 15.

[0199] FIGS. 17A-17D depicts the cDNA sequence of human TANGO 224 and predicted amino acid sequence of TANGO 224 (SEQ ID NO: 18). The open reading frame extends from nucleotide 1 to 1440 of SEQ ID NO: 17.

[0200] FIG. 18 depicts a hydropathy plot of a human TANGO-128, the details of which are described herein.

[0201] FIG. 19 depicts a hydropathy plot of a human TANGO 140-1, the details of which are described herein.

[0202] FIG. 20 depicts a hydropathy plot of a human TANGO 140-2, the details of which are described herein.

[0203] FIG. 21 depicts a hydropathy plot of a human TANGO 197, the details of which are described herein.

[0204] FIG. 22 depicts a hydropathy plot of a human TANGO 212, the details of which are described herein.

[0205] FIG. 23 depicts a hydropathy plot of a human TANGO 213, the details of which are described herein.

[0206] FIG. 24 depicts a hydropathy plot of a human TANGO 224, the details of which are described herein.

[0207] FIG. 25 depicts the alignment of amino acids 269 to 337 of TANGO 128 and the platelet derived growth factor (PDGF) consensus sequence. In these alignments, an uppercase letter between the two sequences indicates an exact match, and a (+) indicates a conservative amino acid substitution.

[0208] FIG. 26 depicts the alignment of amino acids 48 to 160 of TANGO 128 (amino acids 48 to 160 and the CUB consensus sequence. In these alignments, an uppercase letter between the two sequences indicates an exact match, and a (+) indicates a conservative amino acid substitution.

[0209] FIG. 27 depicts the alignment of amino acids 11 to 49 and amino acids 52 to 91 of TANGO 140-1 with the tumor necrosis factor receptor (TNF-R) consensus sequence. In these alignments, an uppercase letter between the two sequences indicates an exact match, and a (+) indicates a conservative amino acid substitution.

[0210] FIG. 28 depicts the alignment of amino acids 25 to 63 and amino acids 66 to 105 of TANGO 140-2 with the tumor necrosis factor receptor (TNF-R) consensus sequence. In these alignments, an uppercase letter between the two sequences indicates an exact match, and a (+) indicates a conservative amino acid substitution.

[0211] FIG. 29 depicts the alignment of amino acids 44 to 215 of TANGO 197 and the von Willebrand Factor (vWF) consensus sequence. In these alignments, an uppercase letter between the two sequences indicates an exact match, and a (+) indicates a conservative amino acid substitution.

[0212] FIG. 30 depicts the alignment of amino acids 61 to 91, amino acids 98 to 132, amino acids 138 to 172, amino acids 178 to 217, and amino acids 223 to 258 of TANGO 212 and the epidermal growth factor (EGF) consensus sequence. In these alignments, an uppercase letter between the two sequences indicates an exact match, and a (+) indicates a conservative amino acid substitution.

[0213] FIG. 31 depicts the alignment of amino acids 400 to 546 of TANGO 212 and the MAM consensus sequence. In these alignments, an uppercase letter between the two sequences indicates an exact match, and a (+) indicates a conservative amino acid substitution.

[0214] FIG. 32 depicts the alignment of amino acids 37 to 81 of TANGO 224 and the thrombospondin type-I (TSP-I) consensus sequence. In these alignments, an uppercase letter between the two sequences indicates an exact match, and a (+) indicates a conservative amino acid substitution.

[0215] FIGS. 33A-33B depicts the cDNA sequence of mouse TANGO 128 and predicted amino acid sequence of mouse TANGO 128 (SEQ ID NO: 22). The open reading frame comprises from nucleotides 211 to 750 of SEQ ID NO: 21.

[0216] FIGS. 34A-34D depicts the cDNA sequence of mouse TANGO 197 and predicted amino acid sequence of mouse TANGO 197 (SEQ ID NO: 24). The open reading frame extends from nucleotide 3 to 1145 of SEQ ID NO: 23.

[0217] FIGS. 35A-35C depicts the cDNA sequence of mouse TANGO 212 and predicted amino acid sequence of mouse TANGO 212 (SEQ ID NO: 26). The open reading frame extends from nucleotide 180 to 1179 of SEQ ID NO: 25.

[0218] FIGS. 36A-36C depicts the cDNA sequence of mouse TANGO 213 and predicted amino acid sequence of mouse TANGO 213 (SEQ ID NO: 28). The open reading frame extends from nucleotide 41 to 616 of SEQ ID NO: 27.

[0219] FIGS. 37A-37F depicts the cDNA sequence of human TANGO 224, form 2 (clone Athsa25a8) and predicted amino acid sequence of human TANGO 224, form 2 (clone Athsa25a8). The open reading frame extends from nucleotide 67 to 2690.

[0220] FIG. 38 depicts the cDNA sequence of rat TANGO 213 (SEQ ID NO: 29).

[0221] FIGS. 39A-39D depicts the cDNA sequence of human HtrA-2 and the predicted amino acid sequence of HtrA-2 (TANGO 214; SEQ ID NO: 32). The open reading frame extends from nucleotide 222 to nucleotide 1580 of SEQ ID NO: 31.

[0222] FIGS. 40A-40B. FIG. 40A depicts a hydropathy plot of human HtrA-2, the details of which are described herein. FIG. 40B depicts the amino acid sequence of HtrA-2.

[0223] FIGS. 41A-41H depicts an alignment of the nucleotide sequence of human HtrA (SEQ ID NO: 165; GenBank Accession Number Y07921) and the nucleotide sequence of human HtrA-2. The nucleotide sequences of human HtrA and human HtrA-2 are 50.9% identical. This alignment was performed using the ALIGN alignment program with a PAM120 scoring matrix.

[0224] FIGS. 42A-42D depicts an alignment of the nucleotide sequence of the open reading frames of human HtrA (nucleotides 39 to 1478) and human HtrA-2. The nucleotide sequences of the open reading frames of human HtrA and human HtrA-2 are 62.3% identical. This alignment was performed using the ALIGN alignment program with a PAM120 scoring matrix.

[0225] FIGS. 43A-43B depicts an alignment of the amino acid sequence of human HtrA and the amino acid sequence of human HtrA-2. The amino acid sequences of human HtrA and human HtrA-2 are 56.5% identical. This alignment was performed using the ALIGN alignment program with a PAM120 scoring matrix.

[0226] FIGS. 44A-44C depicts the cDNA sequence of mouse HtrA-2 (TANGO 214) and the predicted amino acid sequence of HtrA-2 (SEQ ID NO: 34). The open reading frame extends from nucleotides 268 to 1311 of SEQ ID NO: 33.

[0227] FIG. 45 depicts the cDNA sequence and the predicted amino acid sequence of human TANGO 221 (SEQ ID NO: 36). The open reading frame extends from nucleotide 6 to nucleotide 716 of SEQ ID NO: 35.

[0228] FIG. 46 depicts a hydropathy plot of human TANGO 221, the details of which are described herein.

[0229] FIG. 47 depicts the cDNA sequence and the predicted amino acid sequence of human TANGO 222 (SEQ ID NO: 38). The open reading frame extends from nucleotide 33 to nucleotide 434 of SEQ ID NO: 37.

[0230] FIG. 48 depicts a hydropathy plot of human TANGO 222, the details of which are described herein.

[0231] FIGS. 49A-49B depicts the cDNA sequence and the predicted amino acid sequence of human TANGO 176 (SEQ ID NO: 40). The open reading frame extends from nucleotide 101 to nucleotide 1528 of SEQ ID NO: 39.

[0232] FIG. 50 depicts a hydropathy plot of human TANGO 176, the details of which are described herein.

[0233] FIGS. 51A-51B depicts the cDNA sequence of mouse TANGO 176 and predicted amino acid sequence of mouse TANGO 176 (SEQ ID NO: 42). The open reading frame extends from nucleotide 49 to 1524 of SEQ ID NO: 41.

[0234] FIGS. 52A-52C depicts the cDNA sequence and the predicted amino acid sequence of mouse TANGO 201 (SEQ ID NO: 44). The open reading frame extends from nucleotide 60 to nucleotide 1508 of SEQ ID NO: 43.

[0235] FIG. 53 depicts a hydropathy plot of mouse TANGO 201, the details of which are described herein.

[0236] FIGS. 54A-54D depicts the cDNA sequence and the predicted amino acid sequence of human TANGO 201 (SEQ ID NO: 46). The open reading frame extends from nucleotide 179 to nucleotide 1387 of SEQ ID NO: 45.

[0237] FIG. 55 depicts a hydropathy plot of human TANGO 201, the details of which are described herein.

[0238] FIGS. 56A-56D depicts an alignment of the nucleotide sequence of mouse TANGO 201 (nucleotides 1-1758) and human TANGO 201 (nucleotides 101-1660. An identity of 84.8% was obtained using the program GAP (Needleman and Wunsch (1970) J. Mol. Biol. 48:443-453) in GCG (Wisconsin Package Version 9.1, Genetics Computer Group, Madison Wis.) with the following settings: score matrix nwsgapdna, gap penalty 50, and gap extension penalty 3.

[0239] FIG. 57 depicts an alignment of the amino acid sequences of mouse TANGO 201 (amino acids 1-483) and human TANGO 201 (amino acids 1-403). An identity of 97% was obtained using the program GAP (Needleman and Wunsch (1970) J. Mol. Biol. 48:443-453) in GCG (Wisconsin Package Version 9.1, Genetics Computer Group, Madison Wis.) with the following settings: score matrix blosum62, gap penalty 12, and gap extension penalty 4.

[0240] FIG. 58 depicts an alignment of a portion of mouse TANGO 201 amino acid sequence (amino acids 78-264) and a portion of human TANGO 201 amino acid sequence (amino acids 78-264) with a portion of OS-9, a human protein referred to as OS-9 (amino acids 73-250 of SwissProt Accession No. Q13438; SEQ ID NO: 166). This alignment defines a cysteine-rich domain that is conserved between TANGO 201 and OS-9.

[0241] FIGS. 59A-59B depicts the cDNA sequence and the predicted amino acid sequence of human TANGO 223 (SEQ ID NO: 48). The open reading frame of human TANGO 223 extends from nucleotide 30 to nucleotide 770 of SEQ ID NO: 47.

[0242] FIG. 60 depicts a hydropathy plot of human TANGO 223, the details of which are described herein.

[0243] FIG. 61 depicts an alignment of a portion of human TANGO 223 amino acid sequence (amino acids 82-180) with a portion of a putative C. elegans protein belonging to the family of DNA/RNA nonspecific endonucleases (amino acids 288-378 of Swiss-Prot Accession No. 001975; SEQ ID NO: 167). This alignment reveals a cysteine-rich domain that is conserved between TANGO 223 and the C. elegans protein.

[0244] FIGS. 62A-62B depicts the cDNA sequence and the predicted amino acid sequence of mouse TANGO 223 (SEQ ID NO: 50). The open reading frame of mouse TANGO 223 extends from nucleotide 5 to nucleotide 694 of SEQ ID NO: 49.

[0245] FIGS. 63A-63C depicts the cDNA sequence of human TANGO 216 and predicted amino acid sequence of human TANGO 216 (SEQ ID NO: 52). The open reading frame extends from nucleotide 307 to 1770 of SEQ ID NO: 51.

[0246] FIGS. 64A-64C depicts the cDNA sequence of mouse TANGO 216 and predicted amino acid sequence of mouse TANGO 216 (SEQ ID NO: 54). The open reading frame extends from nucleotide 149 to 1609 of SEQ ID NO: 53.

[0247] FIG. 65 depicts a hydropathy plot of human TANGO 216, the details of which are described herein.

[0248] FIG. 66 depicts the alignment of the amino acid sequence of human TANGO 216 and mouse TANGO 216. In this alignment, a (|) between the two sequences indicates an exact match and a (:) indicates similarity.

[0249] FIG. 67 depicts the cDNA sequence of human TANGO 261 and predicted amino acid sequence of human TANGO 261 (SEQ ID NO: 56). The open reading frame extends from nucleotide 6 to 761 of SEQ ID NO: 55.

[0250] FIG. 68 depicts the cDNA sequence of a mouse TANGO 261 clone and predicted amino acid sequence of mouse TANGO 261 (SEQ ID NO: 58). The open reading frame extends from nucleotide 2 to 652 of SEQ ID NO: 57.

[0251] FIG. 69 depicts a hydropathy plot of human TANGO 261, the details of which are described herein.

[0252] FIG. 70 depicts the alignment of the amino acid sequence of human TANGO 261 and a portion of mouse TANGO 261. In this alignment, a (|) between the two sequences indicates an exact match.

[0253] FIGS. 71A-71B depicts the cDNA sequence of human TANGO 262 and predicted amino acid sequence of human TANGO 262 (SEQ ID NO: 60). The open reading frame extends from nucleotide 322 to 999 of SEQ ID NO: 59.

[0254] FIGS. 72A-72B depicts the cDNA sequence of mouse TANGO 262 and predicted amino acid sequence of mouse TANGO 262 (SEQ ID NO: 62). The open reading frame extends from nucleotide 89 to 766 of SEQ ID NO: 61.

[0255] FIG. 73 depicts a hydropathy plot of human TANGO 262, the details of which are described herein.

[0256] FIG. 74 depicts the alignment of the amino acid sequence of human TANGO 262 and mouse TANGO 262. In this alignment, a (|) between the two sequences indicates an exact match.

[0257] FIG. 75 depicts the alignment of the amino acid sequence of human TANGO 262 and K1OC3.4 (SEQ ID NO: 168). In this alignment, a (•) between the two sequences indicates an exact match.

[0258] FIG. 76 depicts the cDNA sequence of human TANGO 266 and predicted amino acid sequence of human TANGO 266 (SEQ ID NO: 64). The open reading frame of the human TANGO 266 cDNA extends from nucleotide 49 to 363 of SEQ ID NO: 63.

[0259] FIG. 77 depicts a hydropathy plot of a human TANGO 266, the details of which are described herein.

[0260] FIG. 78 depicts the alignment of the amino acid sequence of human TANGO 266 and Dendroaspis polypepis venom protein A (SwissProt Accession Number P25687; SEQ ID NO: 169. In this alignment, a (•) between the two sequences indicates an exact match.

[0261] FIGS. 79A-79C depicts the cDNA sequence of human TANGO 267 and predicted amino acid sequence of human TANGO 267 (SEQ ID NO: 66). The open reading frame of human TANGO 267 extends from nucleotide 161 to 2494 of SEQ ID NO: 65.

[0262] FIGS. 80A-80D depicts the alignment of the amino acid sequence of human TANGO 267 and hepatocellular carcinoma associated gene JCL-1 (GenBank Accession Number U92544; SEQ ID NO: 179. In this alignment, a (•) between the two sequences indicates an exact match.

[0263] FIGS. 81A-81D. 81A: Amino acid sequence alignment of Mbkn (TANGO 266) with Bv8 and VPRA. Regions with significant identity are boxed. Numbers correspond to the sequence of the adjacent protein. mBv8-3 is a mouse splice variant 3 of Bv8, and fBv8 is frog Bv8. 81B: Schematic diagram with relative phylogenetic relationship between Mbkn, Bv8, and VPRA. 81C: Hydrophobicity profile and location of cysteines (cys) of Mbkn. The vertical line represents a signal peptide cleavage site. 81D: Western Blot analysis of recombinant MbknFc and MbknAP fusion proteins as well as supernatants from 293 cells and 3T3 cell supernatants using affinity purified rabbit anti-Mbkn polyclonal antibodies.

[0264] FIGS. 82A-82B. 82A: Northern blot analysis of multiple human tissue RNAs hybridized with a Mbkn probe. 82B: Relative expression of Mbkn in multiple human tissues by quantitative PCR of cDNA. C: In situ expression of Mbkn detected in the ovarian stroma, but no expression was detected in the ovarian endothelium. Moderate expression detected in the placenta.

[0265] FIG. 83 depicts alkaline phosphatase detected on the surface of macrophages only in the presence of a Mbkn-AP (TANGO 266-alkaline phosphatase) fusion polypeptide, demonstrating that Mbkn-AP specifically binds to cultured mouse macrophages and is inhibited from binding by Mbkn-Fc fusion protein.

[0266] FIGS. 84A-84B depicts the cDNA sequence of human TANGO 253 and the predicted amino acid sequence of human TANGO 253 (SEQ ID NO: 68). The open reading frame extends from nucleotide 188 to nucleotide 916 of SEQ ID NO: 67.

[0267] FIG. 85 depicts a hydropathy plot of human TANGO 253, the details of which are described herein. Below the hydropathy plot, the amino acid sequence of human TANGO 253 is depicted.

[0268] FIGS. 86A-86B depicts a cDNA sequence of mouse TANGO 253 and the predicted amino acid sequences of mouse TANGO 253 (SEQ ID NO: 70). The open reading frame extends from nucleotide 135 to 863 of SEQ ID NO: 69.

[0269] FIG. 87 depicts a hydropathy plot of mouse TANGO 253, the details of which are described herein. Below the hydropathy plot, the amino acid sequence of mouse TANGO 253 is depicted.

[0270] FIG. 88 depicts an alignment of the amino acid sequence of human TANGO 253 and the amino acid sequence of mouse TANGO 253. The alignment demonstrates that the amino acid sequences of human and mouse TANGO 253 are 93.8% identical. This alignment was performed using the ALIGN program with a PAM120 scoring matrix, a gap length penalty of 12 and a gap penalty of 4.

[0271] FIGS. 89A-89B depicts alignments of the amino acid sequence of human adipocyte complement-mediated protein precursor (Swiss Prot Accession Number Q15848; SEQ ID NO: 171) and the amino acid sequence of human TANGO 253 (89A) or mouse TANGO 253 (89B). 89A shows the amino acid sequences of human adipocyte complement-mediated protein precursor and human TANGO 253 are 38.7% identical. 89B shows the amino acid sequences of human adipocyte complement-mediated precursor procursor protein and mouse TANGO 253 are 38.3% identical. These alignments were performed using the ALIGN alignment program with a PAM120 scoring matrix, a gap length penalty of 12, and a gap penalty of 4.

[0272] FIGS. 90A-90D depicts alignments of the nucleotide sequence of human adipocyte complement-mediated protein precursor (GenBank Accession Number A1417523; SEQ ID NO: 172) and the nucleotide sequence of human TANGO 253. The nucleotide sequences of human adipocyte complement-mediated protein precursor and human TANGO 253 are 29.1% identical. These alignments were performed using the ALIGN alignment program with a PAM120 scoring matrix, a gap length penalty of 12, and a gap penalty of 4.

[0273] FIGS. 91A-91D depicts alignments of the nucleotide sequence of human adipocyte complement-mediated protein precursor (GenBank Accession Number A1417523; SEQ ID NO: 172) and the nucleotide sequence of mouse TANGO 253. The nucleotide sequences of human adipocyte complement-mediated protein precursor and mouse TANGO 253 are 30.4% identical. These alignments were performed using the ALIGN alignment program with a PAM120 scoring matrix, a gap length penalty of 12, and a gap penalty of 4.

[0274] FIGS. 92A-92C depicts the cDNA sequence of human TANGO 257 and the predicted amino acid sequence of human TANGO 257 (SEQ ID NO: 72). The open reading frame extends from nucleotide 88 to nucleotide 1305 of SEQ ID NO: 171.

[0275] FIG. 93 depicts a hydropathy plot of human TANGO 257, the details of which are described herein. Below the hydropathy plot, the amino acid sequence of human TANGO 257 is depicted.

[0276] FIGS. 94A-94C depicts a cDNA sequence of mouse TANGO 257 and the predicted amino acid sequence of mouse TANGO 257 (SEQ ID NO: 74). The open reading frame extends from nucleotide 31 to 1248 of SEQ ID NO: 73.

[0277] FIG. 95 depicts a hydropathy plot of mouse TANGO 257, the details of which are described herein. Below the hydropathy plot, the amino acid sequence of mouse TANGO 257 is depicted.

[0278] FIG. 96 depicts an alignment of the amino acid sequence of human TANGO 257 and the amino acid sequence of mouse TANGO 257. This alignment demonstrates that the amino acid sequences of human and mouse TANGO 257 are 94.1% identical. This alignment was performed using the ALIGN program with a PAM120 scoring matrix, a gap length penalty of 12 and a gap penalty of 4.

[0279] FIG. 97 depicts an alignment of the amino acid sequence encoded by a nucleotide sequence referred to in PCT publication WO 98/39446 (SEQ ID NO: 173) as “gene 64”, and the amino acid sequence of human TANGO 257. Gene 64 encodes a 353 amino acid residue protein that exhibits homology with the human extracellular molecule olfactomedin, which is though to be involved in maintenance, growth and/or differentiation of chemosensory cilia on the apical dendrites of olfactory neurons. The polypeptide encoded by gene 64 also exhibits homology to human TANGO 257, which contains 406 amino acids (i.e., an additional 53 amino acids carboxy to residue 353). The amino acid sequences of amino acid residues 1-353 of the gene 64-encoded polypeptide and human TANGO 257 are identical. As such, the overall amino acid sequence identity between the full length polypeptide encoded by gene 64, and the full-length human TANGO 257 polypeptide is approximately 87%. This alignment was performed using the ALIGN alignment program with a PAM120 scoring matrix, a gap length penalty of 12, and a gap penalty of 4.

[0280] FIGS. 98A-98D depicts an alignment of the nucleotide sequence of gene 64 (PCT Publication Number WO 98/39446 (Accession No. AC02146; SEQ ID NO: 173) and the nucleotide sequence of human TANGO 257. The nucleotide sequences of gene 64 and human TANGO 257 are 93.5% identical. It is noted, however, that among the differences between the two sequences is a cytosine nucleotide at human TANGO 257 position 1146 that results in a human TANGO 257 amino acid sequence of 406 amino acids as opposed to the gene 64 amino acid sequence of only 353 amino acids. Alignment of the nucleotide sequence of the gene 64 open reading frame and that of human TANGO 257 show that the two nucleotide sequences are 87.2% identical. These alignments were performed using the ALIGN program with a PAM220 scoring matrix, a gap length penalty of 12 and a gap penalty of 4.

[0281] FIG. 99 depicts an alignment of the amino acid sequence of the gene 64-encoded polypeptide and the amino acid sequence of mouse TANGO 257. The sequences exhibit an overall amino acid sequence identity of approximately 81.8%. This alignment was performed using an ALIGN program with a PAM120 scoring matrix, a gap length penalty of 512 and a gap penalty of 4.

[0282] FIGS. 100A-100F depicts an alignment of the nucleotide sequence of gene 64 and the nucleotide sequence of mouse TANGO 257. The two sequences are approximately 76.2% identical. Alignment of the nucleotide sequence of the gene 64 open reading frame and that of mouse TANGO 257 shows that the two nucleotide sequences are 77.8% identical. These alignments were performed using the ALIGN program with a PAM220 scoring matrix, a gap length penalty of 12 and a gap penalty of 4.

[0283] FIGS. 101A-101C depicts the cDNA sequence of human INTERCEPT 258 and the predicted amino acid sequence of INTERCEPT 258 (SEQ ID NO: 76). The open reading frame extends from nucleotide 153 to nucleotide 1262 of SEQ ID NO: 75.

[0284] FIG. 102 depicts a hydropathy plot of human INTERCEPT 258, the details of which are described herein. Below the hydropathy plot, the amino acid sequence of human INTERCEPT 258 is depicted.

[0285] FIGS. 103A-103C depicts a cDNA sequence of mouse INTERCEPT 258 and the predicted amino acid sequence of mouse INTERCEPT 258 (SEQ ID NO: 78). The open reading frame extends from nucleotide 107 TO 1288 of SEQ ID NO: 77.

[0286] FIG. 104 depicts a hydropathy plot of mouse INTERCEPT 258, the details of which are described herein. Below the hydropathy plot, the amino acid sequence of mouse INTERCEPT 258 is depicted.

[0287] FIG. 105 depicts an alignment of the amino acid sequence of human INTERCEPT 258 and the amino acid sequence of mouse INTERCEPT 258. The alignment demonstrates that the amino acid sequences of human and mouse INTERCEPT 258 are 62.8% identical. This alignment was performed using the ALIGN program with a PAM120 scoring matrix, a gap length penalty of 12 and a gap penalty of 4.

[0288] FIG. 106 depicts an alignment of the amino acid sequence of human A33 antigen (Swiss Prot Accession Number Q99795; SEQ ID NO: 174) and the amino acid sequence of human INTERCEPT 258. The A33 antigen is a transmembrane glycoprotein and member of the Ig superfamily that may be a cancer cell marker. The amino acid sequences of A33 antigen and human INTERCEPT 258 are 23% identical. This alignment was performed using the ALIGN alignment program with a PAM120 scoring matrix, a gap length penalty of 12, and a gap penalty of 4.

[0289] FIGS. 107A-107F depicts an alignment of the nucleotide sequence of human A33 antigen (Gen Bank Accession Number U79725; SEQ ID NO: 175) and the nucleotide sequence of human INTERCEPT 258. These two nucleotide sequences are 40.6% identical. The nucleotide sequence of the open reading frame of human A33 antigen and that of human INTERCEPT 258 are 44% identical. These alignments were performed using the ALIGN alignment program with a PAM120 scoring matrix, a gap length penalty of 12, and a gap penalty of 4.

[0290] FIG. 108 depicts an alignment of the amino acid sequence of human A33 antigen (Swiss Prot Accession Number Q99795; SEQ ID NO: 174) and the amino acid sequence of mouse INTERCEPT 258. These two amino acid sequences have an overall amino acid identity of 23%. This alignment was performed using the ALIGN alignment program with a PAM120 scoring matrix, a gap length penalty of 12, and a gap penalty of 4.

[0291] FIGS. 109A-109I depicts an alignment of the nucleotide sequence of human A33 antigen (GenBank Accession Number U79725; SEQ ID NO: 175) and the nucleotide sequence of mouse INTERCEPT 258. These two nucleotide sequences are 40% identical. The nucleotide sequence of the open reading frame of human A33 antigen and that of mouse INTERCEPT 258 are 43.2% identical. These alignments were performed using the ALIGN alignment program with a PAM120 scoring matrix, a gap length penalty of 12, and a gap penalty of 4.

[0292] FIGS. 110A-110E depicts an alignment of the nucleotide sequence of human PECAM-1, (SEQ ID NO: 176) an integrin expressed on endothelial cells and the nucleotide sequence of human INTERCEPT 258. These two nucleotide sequences are 40.5% identical. This alignment was performed using ALIGN alignment program with a PAM120 scoring matrix, a gap length of 12, and a gap penalty of 4.

[0293] FIGS. 111A-111D depicts the cDNA sequence and the predicted amino acid sequence of human TANGO 204 (SEQ ID NO: 80). The open reading frame extends from nucleotide 99 to nucleotide 890 of SEQ ID NO: 79.

[0294] FIG. 112 depicts a hydropathy plot of human TANGO 204, the details of which are described herein.

[0295] FIG. 113 depicts an alignment of the somatomedin B domain of human TANGO 204 with a consensus somatomedin B domain. In the consensus sequence, more conserved residues are indicated by uppercase letters, and less conserved residues are indicated by lowercase letters.

[0296] FIG. 114 depicts an alignment of the thrombospondin type 1 domain of human TANGO 204 with a consensus thrombospondin type 1 domain. In the consensus sequence, more conserved residues are indicated by uppercase letters, and less conserved residues are indicated by lowercase letters.

[0297] FIGS. 115A-115B depicts the cDNA sequence and the predicted amino acid sequence of mouse TANGO 204 (SEQ ID NO: 82). The open reading frame extends from nucleotides 81 to 872 of SEQ ID NO: 81.

[0298] FIGS. 116A-116C depicts an alignment of the open reading frames of human TANGO 204 and mouse TANGO 204.

[0299] FIG. 117 depicts an alignment of the amino acid sequences of human TANGO 204 and mouse TANGO 204.

[0300] FIGS. 118A-118C depicts the cDNA sequence and the predicted amino acid sequence of human TANGO 206 (SEQ ID NO: 84). The open reading frame extends from nucleotide 99 to nucleotide 1358 of SEQ ID NO: 83.

[0301] FIG. 119 depicts a hydropathy plot of human TANGO 206, the details of which are described herein.

[0302] FIG. 120 depicts an alignment of the laminin EGF-like domain of human TANGO 206 with a consensus laminin EGF-like domain. In the consensus sequence, more conserved residues are indicated by uppercase letters, and less conserved residues are indicated by lowercase letters.

[0303] FIGS. 121A-121D depicts the cDNA sequence and the predicted amino acid sequence of mouse TANGO 206 (SEQ ID NO: 86). The open reading frame extends from nucleotide 332-1591 (SEQ ID NO: 85).

[0304] FIGS. 122A-122D depicts an alignment of the open reading frames of human TANGO 206 and mouse TANGO 206.

[0305] FIGS. 123A-123B depicts an alignment of the amino acid sequences of human TANGO 206 and mouse TANGO 206.

[0306] FIGS. 124A-124E depicts the cDNA sequence and the predicted amino acid sequence of human TANGO 209 (SEQ ID NO: 88). The open reading frame extends from nucleotide 194-1531 of SEQ ID NO: 87.

[0307] FIG. 125 depicts a hydropathy plot of human TANGO 209, the details of which are described herein.

[0308] FIG. 126 depicts an alignment of the thyroglobulin type 1 domains of human TANGO 209 with a consensus thyroglobulin type 1 domain. In the consensus sequence, more conserved residues are indicated by uppercase letters, and less conserved residues are indicated by lowercase letters.

[0309] FIG. 127 depicts an alignment of the Kazal-type serine protease inhibitor domains of human TANGO 209 with a consensus Kazal-type serine protease inhibitor domain. In the consensus sequence, more conserved residues are indicated by uppercase letters, and less conserved residues are indicated by lowercase letters.

[0310] FIGS. 128A-128E depicts the cDNA sequence and the predicted amino acid sequence of mouse TANGO 209 (SEQ ID NO: 90). The open reading frame extends from nucleotide 187 to nucleotide 1527 of SEQ ID NO: 89.

[0311] FIGS. 129A-129D depicts an alignment of the open reading frames of human TANGO 209 and mouse TANGO 209.

[0312] FIGS. 130A-130B depicts an alignment of the amino acid sequences of human TANGO 209 and mouse TANGO 209.

[0313] FIG. 131 depicts the cDNA sequence and the predicted amino acid sequence of human TANGO 244 (SEQ ID NO: 92). The open reading frame extends from nucleotide 85 to nucleotide 570 of SEQ ID NO: 91.

[0314] FIG. 132 depicts a hydropathy plot of human TANGO 244, the details of which are described herein.

[0315] FIG. 133 depicts an alignment of the immunoglobulin domain of human TANGO 244 with a consensus hidden Markov model immunoglobulin domain. In the consensus sequence, more conserved residues are indicated by uppercase letters, and less conserved residues are indicated by lowercase letters. A “−” within a sequence indicates a gap created in the sequence for purposes of alignment. A “+” between the aligned sequences indicates a conservative amino acid difference.

[0316] FIG. 134 depicts an alignment of the amino acid sequence of human TANGO 244 and the amino acid sequence of human CTH (Genbank Accession Number AF061022; SEQ ID NO: 177; Marcuz et al., Eur J. Immunol. 28:4094-4104). This alignment was created using ALIGN (version 2.0; PAM120 scoring matrix; gap length penalty of 12; gap penalty of 4). In this alignment, the sequences are 48.6% identical.

[0317] FIGS. 135A-135B depicts the cDNA sequence and the predicted amino acid sequence of human TANGO 246 (SEQ ID NO: 94). The open reading frame extends from nucleotide 94 to nucleotide 1080 of SEQ ID NO: 93.

[0318] FIG. 136 depicts a hydropathy plot of human TANGO 246, the details of which are described herein.

[0319] FIG. 137 depicts an alignment of the cell cycle protein domain of human TANGO 246 with a consensus hidden Markov model cell cycle protein domain. In the consensus sequence, more conserved residues are indicated by uppercase letters, and less conserved residues are indicated by lowercase letters. A “−” within a sequence indicates a gap created in the sequence for purposes of alignment. A “+” between the aligned sequences indicates a conservative amino acid difference.

[0320] FIG. 138 depicts an alignment of the ABC transporter domain of human TANGO 246 with a consensus hidden Markov model ABC transporter domain. In the consensus sequence, more conserved residues are indicated by uppercase letters, and less conserved residues are indicated by lowercase letters. A “−” within a sequence indicates a gap created in the sequence for purposes of alignment. A “+” between the aligned sequences indicates a conservative amino acid difference.

[0321] FIGS. 139A-139D depicts the cDNA sequence and the predicted amino acid sequence of human TANGO 275 (SEQ ID NO: 96). The open reading frame extends from nucleotide 65 to nucleotide 3931 of SEQ ID NO: 95.

[0322] FIG. 140 depicts a hydropathy plot of human TANGO 275, the details of which are described herein.

[0323] FIGS. 141A-141B depicts alignments of the EGF-like domains of human TANGO 275 with a consensus hidden Markov model EGF-like domain. The TANGO 275 EGF-like domains are at amino acids 99 to 126, 345 to 380, 564 to 600, 606 to 644, 650 to 687, 693 to 728, 734 to 769, 775 to 810, 816 to 850, 856 to 893, 983 to 1020, 1026 to 1061, 1072 to 1107, 1203 to 1238, and 1244 to 1283 of SEQ ID NO: 96. In the consensus sequence, more conserved residues are indicated by uppercase letters, and less conserved residues are indicated by lowercase letters. A “−” within a sequence indicates a gap created in the sequence for purposes of alignment. A “+” between the aligned sequences indicates a conservative amino acid difference.

[0324] FIG. 142 depicts alignments of the TB domains of human TANGO 275 with a consensus hidden Markov model TB domain. In the consensus sequence, more conserved residues are indicated by uppercase letters, and less conserved residues are indicated by lowercase letters. A “−” within a sequence indicates a gap created in the sequence for purposes of alignment. A “+” between the aligned sequences indicates a conservative amino acid difference.

[0325] FIG. 143 depicts alignments of the metallothionein domain of human TANGO 275 (amino acids 694 to 708 of SEQ ID NO: 96) with a consensus hidden Markov model metallothionein domain. In the consensus sequence, more conserved residues are indicated by uppercase letters, and less conserved residues are indicated by lowercase letters. A “−” within a sequence indicates a gap created in the sequence for purposes of alignment. A “+” between the aligned sequences indicates a conservative amino acid difference.

[0326] FIGS. 144A-144H depicts an alignment of the nucleotide sequence of human TANGO 275 and the nucleotide sequence of mouse LTBP-3 (Genbank Accession Number L40459; SEQ ID NO: 178). This alignment was created using ALIGN (version 2.0; PAM120 scoring matrix; gap length penalty of 12; gap penalty of 4). In this alignment, the sequences are 77.1% identical.

[0327] FIGS. 145A-145C depicts an alignment of the amino acid sequence of human TANGO 275 and the amino acid sequence of mouse LTBP-3 (GENSEQ Accession Number R79475; SEQ ID NO: 179). This alignment was created using ALIGN (version 2.0; PAM120 scoring matrix, gap length penalty of 12; gap penalty of 4). In this alignment, the sequences are 82.8% identical.

[0328] FIGS. 146A-146G depicts the cDNA sequence and the predicted amino acid sequence of mouse TANGO 275 (SEQ ID NO: 98). The open reading frame extends from nucleotide 157 to nucleotide 3915 of SEQ ID NO: 97.

[0329] FIGS. 147A-147B depicts the cDNA sequence and the predicted amino acid sequence of human MANGO 245 (SEQ ID NO: 100). The open reading frame extends from nucleotide 105 to nucleotide 1148 of SEQ ID NO: 99.

[0330] FIG. 148 depicts a hydropathy plot of human MANGO 245, the details of which are described herein.

[0331] FIGS. 149A-149B depicts the cDNA sequence and the predicted amino acid sequence of monkey MANGO 245 (SEQ ID NO: 102). The open reading frame extends from nucleotide 250 to nucleotide 1236 of SEQ ID NO: 101.

[0332] FIG. 150 depicts an alignment of the amino acid sequences of human MANGO 245 and monkey MANGO 245. This alignment was created using ALIGN (version 2.0; PAM120 scoring matrix, gap length penalty of 12; gap penalty of 4). In this alignment, the sequences are 84.8% identical.

[0333] FIG. 151 depicts alignments of the CIq domains of human MANGO 245 with a consensus hidden Markov model CIq domain. In the consensus sequence, more conserved residues are indicated by uppercase letters, and less conserved residues are indicated by lowercase letters. A “−” within a sequence indicates a gap created in the sequence for purposes of alignment. A “+” between the aligned sequences indicates a conservative amino acid difference.

[0334] FIG. 152 depicts alignments of the CIq domains of monkey MANGO 245 with a consensus hidden Markov model CIq domain. In the consensus sequence, more conserved residues are indicated by uppercase letters, and less conserved residues are indicated by lowercase letters. A “−” within a sequence indicates a gap created in the sequence for purposes of alignment. A “+” between the aligned sequences indicates a conservative amino acid difference.

[0335] FIG. 153 depicts the cDNA sequence of mouse MANGO 245 and the predicted amino acid sequence of mouse MANGO 245 (SEQ ID NO: 104). The open reading frame extends from nucleotide 29 to nucleotide 625 of SEQ ID NO: 103.

[0336] FIGS. 154A-154B depicts an alignment of nucleotide 51 to nucleotide 748 of human MANGO 245 with mouse MANGO 245. This alignment was created using BESTFIT (BLOSUM 62 scoring matrix; gap open penalty of 12; frame shift penalty of 5; gap extend penalty of 4). In this alignment, the sequences are 89.6% identical.

[0337] FIG. 155 depicts an alignment of the amino acid sequence of human TANGO 246 and the amino acid sequence of Arabidopsis thaliana AIG1 (Genbank Accession Number AAC49289; SEQ ID NO: 180).

[0338] FIGS. 156A-156B depicts an alignment of the amino acid sequence of mouse TANGO 275 and the amino acid sequence of mouse LTBP-3 (GENSEQ Accession Number R79475; SEQ ID NO: 179). This alignment was created using ALIGN (version 2.0; PAM120 scoring matrix, gap length penalty of 12; gap penalty of 4). In this alignment, the sequences are 97.4% identical.

[0339] FIGS. 157A-157C depicts the cDNA sequence of human INTERCEPT 340 and the predicted amino acid sequence of INTERCEPT 340 (SEQ ID NO: 106). The open reading frame extends from nucleotide 1222 to nucleotide 1944 of SEQ ID NO: 105.

[0340] FIG. 158 depicts a hydropathy plot of human INTERCEPT 340, the details of which are described herein. Below the hydropathy plot, the numbers corresponding to the amino acid sequence of INTERCEPT 340 are indicated. The amino acid sequence of each of the fibrillar collagen C-terminal domains are indicated by underlining and the abbreviation “COLFI”.

[0341] FIG. 159 depicts an alignment of each of the fibrillar collagen C-terminal domains (also referred to herein as “COLF domains”) of human INTERCEPT 340 with consensus hidden Markov model COLF domains. For each alignment, the upper sequence is the consensus amino acid sequence, while the lower sequence amino acid sequence corresponds to amino acid 58 to amino acid 116, amino acid 126 to amino acid 151, and amino acid 186 to amino acid 217.

[0342] FIGS. 160A-160C depicts the cDNA sequence of human MANGO 003 and the predicted amino acid sequence of MANGO 003 (SEQ ID NO: 108). The open reading frame extends from nucleotide 57 to nucleotide 1568 of SEQ ID NO: 107.

[0343] FIG. 161 depicts a hydropathy plot of human MANGO 003, the details of which are described herein. Below the hydropathy plot, the numbers corresponding to the amino acid sequence of MANGO 003 are indicated. The amino acid sequence of each of the immunoglobulin domains, and the neurotransmitter gated ion channel domain are indicated by underlining and the abbreviations “ig” and “neur chan”, respectively.

[0344] FIG. 162 depicts an alignment of each of the immunoglobulin domains (also referred to herein as “Ig domains”) of human MANGO 003 with the consensus hidden Markov model immunoglobulin domains. For each alignment, the upper sequence is the consensus sequence, while the lower sequence corresponds to amino acid 44 to amino acid 101, amino acid 165 to amino acid 223, and amino acid 261 to amino acid 340.

[0345] FIG. 163 depicts an alignment of the neurotransmitter gated ion channel domain of human MANGO 003 with the consensus hidden Markov model neurotransmitter gated ion channel domain. The upper sequence is the consensus sequence, while the lower sequence corresponds to amino acid 388 amino acid 397.

[0346] FIGS. 164A-164B depicts the cDNA sequence of mouse MANGO 003 and the predicted amino acid sequence of MANGO 003 (SEQ ID NO: 110). The open reading frame extends from nucleotide 1 to nucleotide 626 of SEQ ID NO: 109.

[0347] FIG. 165 depicts a hydropathy plot of mouse MANGO 003, the details of which are described herein. Below the hydropathy plot, the numbers corresponding to the amino acid sequence of mouse MANGO 003 are indicated.

[0348] FIGS. 166A-166B depicts the cDNA sequence of human MANGO 347 and the predicted amino acid sequence of MANGO 347 (SEQ ID NO: 112). The open reading frame extends from nucleotide 31 to nucleotide 444 of SEQ ID NO: 111.

[0349] FIG. 167 depicts a hydropathy plot of human MANGO 347, the details of which are described herein. Below the hydropathy plot, the numbers corresponding to the amino acid sequence of MANGO 347 are indicated. The amino acid sequence of the CUB domain is indicated by underlining and the abbreviation “CUB”.

[0350] FIG. 168 depicts an alignment of the CUB domain of human MANGO 347 with a consensus hidden Markov model CUB domain. The upper sequence is the consensus amino acid sequence, while the lower sequence corresponds to amino acid 40 to amino acid 136.

[0351] FIGS. 169A-169F depicts the cDNA sequence of human TANGO 272 and the predicted amino acid sequence of TANGO 272 (SEQ ID NO: 114). The open reading frame extends from nucleotide 230 to nucleotide 3379 of SEQ ID NO: 113.

[0352] FIG. 170 depicts a hydropathy plot of human TANGO 272, the details of which are described herein. Below the hydropathy plot, the numbers corresponding to the amino acid sequence of TANGO 272 are indicated. The amino acid sequence of each of the fourteen EGF-like domains and the delta serrate ligand domain is indicated by underlining and the abbreviation “EGF-like” and “DSL”, respectively.

[0353] FIGS. 171A-171D depicts an alignment of each of the EGF-like domains of human TANGO 272 with consensus hidden Markov model EGF-like domains. The upper sequence is the consensus amino acid sequence, while the lower sequence corresponds to amino acid 151 to amino acid 181; 200 to 229; 242 to 272; 285 to 315; 328 to 358; 378 to 404; 417 to 447; 460 to 490; 503 to 533; 546 to 576; 589 to 619; 632 to 661; 674 to 704; and 717 to 747. For alignment of the delta serrate ligand domain, the upper sequence is the consensus hidden Markov model, while the lower sequence corresponds to amino acid 518 to amino acid 576.

[0354] FIGS. 172A-172C depicts the cDNA sequence of mouse TANGO 272 and the predicted amino acid sequence of TANGO 272 (SEQ ID NO: 116). The open reading frame extends from nucleotide 1 to nucleotide 1492 of SEQ ID NO: 115.

[0355] FIG. 173 depicts a hydropathy plot of mouse TANGO 272, the details of which are described herein. Below the hydropathy plot, the numbers corresponding to the amino acid sequence of mouse TANGO 272 are indicated.

[0356] FIGS. 174A-174B depicts the cDNA sequence of human TANGO 295 and the predicted amino acid sequence of TANGO 295 (SEQ ID NO: 118). The open reading frame extends from nucleotide 217 to nucleotide 684 of SEQ ID NO: 117.

[0357] FIG. 175 depicts a hydropathy plot of human TANGO 295, the details of which are described herein. Below the hydropathy plot, the numbers corresponding to the amino acid sequence of human TANGO 295 are indicated. The amino acid sequence of the pancreatic ribonuclease domain is indicated by underlining and the abbreviation “RNase A”.

[0358] FIG. 176 depicts an alignment of the pancreatic ribonuclease domain of human TANGO 295 with a consensus hidden Markov model pancreatic ribonuclease domain. The upper sequence is the consensus amino acid sequence, while the lower sequence corresponds to amino acid 32 to amino acid 156.

[0359] FIGS. 177A-177B depicts the cDNA sequence of human TANGO 354 and the predicted amino acid sequence of TANGO 354 (SEQ ID NO: 120). The open reading frame extends from nucleotide 62 to nucleotide 976 of SEQ ID NO: 119.

[0360] FIG. 178 depicts a hydropathy plot of human TANGO 354, the details of which are described herein. Below the hydropathy plot, the numbers corresponding to the amino acid sequence of human TANGO 354 are indicated. The amino acid sequence of the immunoglobulin domain is indicated by underlining and the abbreviation “ig”.

[0361] FIG. 179 depicts an alignment of the immunoglobulin domain of human TANGO 354 with a consensus hidden Markov model immunoglobulin domains. The upper sequence is the consensus amino acid sequence, while the lower sequence corresponds to amino acid 33 to amino acid 110.

[0362] FIGS. 180A-180D depicts the cDNA sequence of human TANGO 378 and the predicted amino acid sequence of TANGO 378 (SEQ ID NO: 122). The open reading frame extends from nucleotide 42 to nucleotide 1625 of SEQ ID NO: 121.

[0363] FIG. 181 depicts a hydropathy plot of human TANGO 378, the details of which are described herein. Below the hydropathy plot, the numbers corresponding to the amino acid sequence of human TANGO 378 are indicated. The amino acid sequence of the seven transmembrane domain is indicated by underlining and the abbreviation “7tm”.

[0364] FIG. 182 depicts an alignment of the seven transmembrane receptor domain of human TANGO 378 with a consensus hidden Markov model of this domain. The upper sequence is the consensus amino acid sequence, while the lower sequence corresponds to amino acid 187 to amino acid 516 of TANGO 378 (SEQ ID NO: 122). In this alignment an uppercase letter between the two sequences indicates an exact match, and a “+” indicates a similarity.

[0365] FIGS. 183A-183C depicts a global alignment between the nucleotide sequence of the open reading frame (ORF) of SEQ ID NO: 107, human MANGO 003, and the nucleotide sequence of the open reading frame of SEQ ID NO: 109, mouse MANGO 003. The upper sequence is the human MANGO 003 ORF nucleotide sequence, while the lower sequence is the mouse MANGO 003 ORF nucleotide sequence. These nucleotides sequences share a 31.1% identity. The global alignment was performed using the ALIGN program version 2.0 u (Matrix file used: pam 120.mat, gap penalties of −12/−4 with a global alignment score of −1212; Myers and Miller, 1989, CABIOS 4:11-7).

[0366] FIGS. 184A-184B depicts a local alignment between the nucleotide sequence of human MANGO 003 and the nucleotide sequence of mouse MANGO 003. The upper sequence is the human MANGO 003 nucleotide sequence, while the lower sequence is the mouse MANGO 003 nucleotide sequence. These nucleotides sequences share a 62.8% identity over nucleotide 970 to nucleotide 2080 of the human MANGO 003 sequence (nucleotide 10 to nucleotide 1070 of mouse MANGO 003). The local alignment was performed using the L-ALIGN program version 2.0 u54 July 1996 (Matrix file used: pam 120.mat, gap penalties of −12/−4 with a score of 3241; Huang and Miller, 1991, Adv. Appl. Math. 12:373-381).

[0367] FIG. 185 depicts a global alignment between the amino acid sequence of human MANGO 003. The upper sequence is the human MANGO 003 amino acid sequence, while the lower sequence is the mouse MANGO 003 amino acid sequence. These amino acid sequences share a 30.1% identity. The global alignment was performed using the ALIGN program version 2.0 u (Matrix file used: pam 120.mat, gap penalties of −12/−4 with a global alignment score of 488; Myers and Miller, 1989, CABIOS 4:11-7).

[0368] FIGS. 186A-186E depicts a global alignment between the nucleotide sequence of the open reading frame (ORF) of human TANGO 272 and the nucleotide sequence of the open reading frame of mouse TANGO 272. The upper sequence is the mouse TANGO 272 ORF nucleotide sequence, while the lower sequence is the human TANGO 272 ORF nucleotide sequence. These nucleotides sequences share a 39.1% identity. The global alignment was performed using the ALIGN program version 2.0 u (Matrix file used: pam 120.mat, gap penalties of −12/−4 with a global alignment score of-79; Myers and Miller, 1989, CABIOS 4:11-7).

[0369] FIGS. 187A-187C depicts a local alignment between the nucleotide sequence of human TANGO 272 and the nucleotide sequence of mouse TANGO 272. The upper sequence is the human TANGO 272 nucleotide sequence, while the lower sequence is the mouse TANGO 272 nucleotide sequence. These nucleotides sequences share a 67.6% identity over nucleotide 1890 to nucleotide 4610 of the human TANGO 272 sequence (nucleotide 10 to nucleotide 2560 of mouse TANGO 272). The local alignment was performed using the L-ALIGN program version 2.0 u54 July 1996 (Matrix file used: pam 120.mat, gap penalties of −12/−4 with a score of 8462; Huang and Miller, 1991, Adv. Appl. Math. 12:373-381).

[0370] FIGS. 188A-188B depicts a global alignment between the amino acid sequence of human TANGO 272 and the amino acid sequence of mouse TANGO 272. The upper sequence is the human TANGO 272 amino acid sequence, while the lower sequence is the mouse TANGO 272 amino acid sequence. These amino acid sequences share a 38.2% identity. The global alignment was performed using the ALIGN program version 2.0 u (Matrix file used: pam 120.mat, gap penalties of −12/−4 with a global alignment score of −19; Myers and Miller, 1989, CABIOS 4:11-7).

[0371] FIGS. 189A-198D depicts the cDNA sequence of rat TANGO 272 and the predicted amino acid sequence of TANGO 272 (SEQ ID NO: 124). The open reading frame extends from nucleotide 925 to nucleotide 2832 of SEQ ID NO: 123.

[0372] FIGS. 190A-190H depicts a global alignment between the nucleotide sequence of human TANGO 272 and the nucleotide sequence of rat TANGO 272. The upper sequence is the human TANGO 272 nucleotide sequence, while the lower sequence is the rat TANGO 272 nucleotide sequence. These nucleotides sequences share a 55.7% identity. The global alignment was performed using the ALIGN program version 2.0 u (Matrix file used: pam 120.mat, gap penalties of −12/−4 with a global alignment score of 8635; Myers and Miller, 1989, CABIOS 4:11-7).

[0373] FIGS. 191A-191F depicts a global alignment between the nucleotide sequence of mouse TANGO 272 and the nucleotide sequence of rat TANGO 272. The upper sequence is the mouse TANGO 272 nucleotide sequence, while the lower sequence is the rat TANGO 272 nucleotide sequence. These nucleotides sequences share a 43.7% identity. The global alignment was performed using the ALIGN program version 2.0 u (Matrix file used: pam 120.mat, gap penalties of −12/−4 with a global alignment score of 2827; Myers and Miller, 1989, CABIOS 4:11-7).

[0374] FIG. 192 depicts a global alignment of the human TANGO 295 and GenPept AF037081 amino acid sequences. The upper sequence is the human TANGO 295 sequence, while the lower sequence is the GenPept AF037081 (SEQ ID NO: 181) sequence. GenPept AF037081 encodes a ribonuclease k6 protein. The global alignment revealed a 53.2% identity between these two sequences (Matrix file used: pam 120.mat, gap penalties of −12/−4 with a global alignment score of 405; Myers and Miller, 1989, CABIOS 4:11-7).

[0375] FIGS. 193A-193C depicts a global alignment of the human TANGO 295 and GenPept AF037081 nucleotide sequences. The upper sequence is the human TANGO 295 sequence, while the lower sequence is the GenPept AF037081 (SEQ ID NO: 181) sequence. The global alignment revealed a 22.6% identity between these two sequences (Matrix file used: pam 120.mat, gap penalties of −12/−4 with a global alignment score of −2718; Myers and Miller, 1989, CABIOS 4:11-7).

[0376] FIGS. 194A-194B depicts a local alignment of the human TANGO 295 and GenPept AF037081 nucleotide sequences. The upper sequence is the human TANGO 295 sequence, while the lower sequence is the GenPept AF037081 (SEQ ID NO: 181) sequence. The local alignment revealed a 62.7% identity between nucleotide 235 to nucleotide 687 of human TANGO 295, and nucleotide 3 to nucleotide 453 of AF037081 (SEQ ID NO: 181); 43.4% identity between nucleotide 410 to nucleotide 850 of human TANGO 295, and nucleotide 3 to nucleotide 450 of AF037081 (SEQ ID NO: 181); and 46.5% identity between nucleotide 432 to nucleotide 700 of human TANGO 295, and nucleotide 5 to nucleotide 251 of AF037081 (Matrix file used: pam 120.mat, gap penalties of −12/−4 with a global alignment score of 1214; Huang and Miller, 1991, Adv. Appl. Math. 12:373-381).

[0377] FIGS. 195A-195B depicts an alignment of each of the EGF-like domains and laminin-EGF-like domains of mouse TANGO 272 with consensus hidden Markov model EGF-like domains. For alignments of the EGF-like domains, the upper sequence is the consensus amino acid sequence, while the lower sequence corresponds to amino acids 37-67; amino acid 80 to amino acid 110; amino acid 123 to amino acid 153; and amino acid 166 to amino acid 196. For alignments of the laminin/EGF-like domains, the upper sequence is the consensus hidden Markov model domain, while the lower sequence corresponds to amino acid 3 to amino acid 37; amino acid 41 to amino acid 80; amino acid 83 to amino acid 123; and amino acid 127 to amino acid 172. For alignment of the delta serrate ligand(DSL) domain, the upper sequence is the consensus hidden Markov model domain, while the lower sequence corresponds to amino acid 10 to amino acid 67.

[0378] FIG. 196 depicts a hydropathy plot of rat TANGO 272, the details of which are described herein. Below the hydropathy plot, the numbers corresponding to the amino acid sequence of rat TANGO 272 are indicated.

[0379] FIGS. 197A-197D depicts an alignment of each of the EGF-like domains and laminin-EGF-like domains of rat TANGO 272 with consensus hidden Markov model of EGF-like domains. For alignments of the EGF-like domains, the upper sequence is the consensus amino acid sequence, while the lower sequence corresponds to amino acid 18 to amino acid 48; 61 to 91; 105-137; 150-180; 193-223; 236-266; 279-309; 322-352; 365-394; 407-437; and 450-480. For alignments of the laminin/EGF-like domains, the upper sequence is the consensus hidden Markov model domain, while the lower sequence corresponds to 22-61; 65-105; 109-150; 154-193; 197-236; 240-279; 283-322; 326-365; 368-407; 411-450; and 454-489. For alignment of the delta serrate ligand domain, the upper sequence is the consensus hidden Markov model domain, while the lower sequence corresponds to amino acids 246-309.

[0380] FIGS. 198A-198B depicts the cDNA sequence of human TANGO 339 and the predicted amino acid sequence of human TANGO 339 (SEQ ID NO: 126). The open reading frame extends from nucleotide 210 to nucleotide 1019 of SEQ ID NO: 125.

[0381] FIG. 199 depicts a hydropathy plot of human TANGO 339, the details of which are described herein. The dashed vertical line separates the signal sequence (amino acids 1 to 42) on the left from the mature protein (amino acids 43 to 270) on the right.

[0382] FIG. 200 depicts an alignment of the amino acid sequence of human CD9 antigen (Accession Number NM_{—}001769 of SEQ ID NO: 125) and the amino acid sequence of human TANGO 339. The amino acid sequences of human CD9 antigen and human TANGO 339 are 24.1% identical. This alignment was performed using the ALIGN alignment program with a PAM120 scoring matrix, a gap length penalty of 12, and a gap penalty of 4.

[0383] FIGS. 201A-201B depicts an alignment of the nucleotide sequence of the coding region of human CD9 antigen (Accession Number NM_{—}001769; SEQ ID NO: 182) and the nucleotide sequence of the coding region of human TANGO 339. The nucleotide sequences of the coding regions of human CD9 antigen and human TANGO 339 are 45.9% identical. This alignment was performed using the ALIGN alignment program with a PAM120 scoring matrix, a gap length penalty of 12, and a gap penalty of 4.

[0384] FIG. 202 depicts a cDNA sequence of human TANGO 358 and the predicted amino acid sequence of human TANGO 358 (SEQ ID NO: 128). The open reading frame of human TANGO 358 extends from nucleotide 184 to 429 of SEQ ID NO: 127.

[0385] FIG. 203 depicts a hydropathy plot of human TANGO 358, the details of which are described herein.

[0386] FIG. 204 depicts the cDNA sequence of human TANGO 365 and the predicted amino acid sequence of human TANGO 365 (SEQ ID NO: 130). The open reading frame extends from nucleotide 56 to nucleotide 550 of SEQ ID NO: 129.

[0387] FIG. 205 depicts a hydropathy plot of human TANGO 365, the details of which are described herein.

[0388] FIG. 206 depicts the cDNA sequence of human TANGO 368 and the predicted amino acid sequence of TANGO 368 (SEQ ID NO: 132). The open reading frame of human TANGO 368 extends from nucleotide 152 to nucleotide 328 of SEQ ID NO: 131.

[0389] FIG. 207 depicts a hydropathy plot of human TANGO 368, the details of which are described herein.

[0390] FIGS. 208A-208B depicts a local alignment of the nucleotide sequence of full-length human TANGO 368 and a fragment of the human T-cell receptor gamma V1 gene region (Accession Number AF057177; SEQ ID NO: 183). The nucleotide sequence of human TANGO 368 and the human T-cell receptor gamma V1 gene region are 99.3% identical for a 973 bp overlap. This alignment was performed using the LALIGN program with a PAM120 scoring matrix, a gap length penalty of 12 and a gap penalty of 4.

[0391] FIG. 209 depicts a cDNA sequence of human TANGO 369 and the predicted amino acid sequence of human TANGO 369 (SEQ ID NO: 134). The open reading frame of human TANGO 369 extends from nucleotide 162 to 335 of SEQ ID NO: 133.

[0392] FIG. 210 depicts a hydropathy plot of human TANGO 369, the details of which are described herein.

[0393] FIG. 211 depicts the cDNA sequence of human TANGO 383 and the predicted amino acid sequence of human TANGO 383 (SEQ ID NO: 136). The open reading frame of human TANGO 383 extends from nucleotide 104 to nucleotide 523 of SEQ ID NO: 135.

[0394] FIG. 212 depicts a hydropathy plot of human TANGO 383, the details of which are described herein.

[0395] FIG. 213 depicts an alignment of the amino acid sequence of TANGO 383 and the amino acid sequence of Neuronal Thread Protein AD7C-NTP. The alignments demonstrates that the amino acid sequences of TANGO 383 and Neuronal Thread Protein AD7C-NTP (SEQ ID NO: 184) are 52% identical. This alignment was performed using the ProDom NCBI-BLASTP2 program with graphical output using the following settings: Matrix: BLOSUM62; Expect: 0.1; Filter: none.

[0396] FIG. 214 depicts the cDNA sequence of human MANGO 346 and the predicted amino acid sequence of human MANGO 346 (SEQ ID NO: 138). The open reading frame extends from nucleotide 319 to nucleotide 498 of SEQ ID NO: 137.

[0397] FIG. 215 depicts a hydropathy plot of human MANGO 346, the details of which are described herein.

[0398] FIGS. 216A-216B depicts the cDNA sequence of human MANGO 349 and the predicted amino acid sequence of human MANGO 349 (SEQ ID NO: 140). The open reading frame of human MANGO 349 extends from nucleotide 221 to nucleotide 721 of SEQ ID NO: 139.

[0399] FIG. 217 depicts a hydropathy plot of human MANGO 349, the details of which are described herein.

[0400] FIGS. 218A-218B depicts the cDNA sequence of INTERCEPT 307 and the predicted amino acid sequence of human INTERCEPT 307. The open reading frame of INTERCEPT 307 extends from nucleotides 45 to 1130.

[0401] FIG. 219 depicts a hydropathy plot of human INTERCEPT 307, the details of which are described herein.

[0402] FIG. 220 depicts an alignment of the amino acid sequence of PB39; Accession Number NM_{—}003627; SEQ ID NO: 185 and the amino acid sequence of human INTERCEPT 307. The amino acid sequences of human PB39 and human INTERCEPT 307 are 21.0% identical. This alignment was performed using the ALIGN alignment program with a PAM120 scoring matrix, a gap length penalty of 12, and a gap penalty of 4.

[0403] FIGS. 221A-221C depicts an alignment of the nucleotide sequence of the coding region of PB39; Accession Number AF045584 (SEQ ID NO: 186) and the nucleotide sequence of the coding region of human INTERCEPT 307. The nucleotide sequences of the coding regions of PB39 and human INTERCEPT 307 are 40.9% identical. The full-length nucleic acid sequences of PB39 (Accession Number NM_{—}003627; SEQ ID NO: 185 and human INTERCEPT 307 are 44.0% identical. These alignments were performed using the ALIGN alignment program with a PAM120 scoring matrix, a gap length penalty of 12, and a gap penalty of 4.

[0404] FIG. 222 depicts an alignment of the human INTERCEPT 307 amino acid sequence with the human eosinophil granule major basic protein amino acid sequence (Accession Number Z26248; SEQ ID NO: 187). The amino acid sequences of INTERCEPT 307 and human eosinophil granule major basic protein are 13.8% identical. This alignment was performed using the ALIGN alignment program with a PAM120 scoring matrix, a gap length penalty of 12, and a gap penalty of 4.

[0405] FIGS. 223A-223B shows an alignment of the nucleotide sequence of INTERCEPT 307 coding region and the nucleotide sequence of human eosinophil granule major basic protein coding region (Accession Number Z26248; SEQ ID NO: 187). The nucleotide sequences of the coding regions are 38.1% identical. The full-length INTERCEPT 307 nucleic acid sequence and human eosinophil granule major basic protein cDNA (Accession Number Z26248) have an overall sequence identity of 57.3%. These alignments were performed using the ALIGN alignment program with a PAM120 scoring matrix, a gap length penalty of 12, and a gap penalty of 4.

[0406] FIGS. 224A-224B depicts the cDNA sequence of human MANGO 511 and the predicted amino acid sequence of human MANGO 511 (SEQ ID NO: 144). The open reading frame of human MANGO 511 extends from nucleotide 108 to 1004 of SEQ ID NO: 143.

[0407] FIG. 225 depicts a hydropathy plot of human MANGO 511, the details of which are described herein.

[0408] FIG. 226 depicts a local alignment of the amino acid sequence of leukocyte Ig-like receptor-1 (LIR-1; Accession Number AAB63522) and the amino acid sequence of human MANGO 511. The amino acid sequences of human LIR-1 and human MANGO 511 are 59.2% identical over the 233 amino acid overlap region that was analyzed. This alignment were performed using the LALIGN version 2.0, July 1996, local alignment program with a PAM120 scoring matrix, a gap length penalty of 12, and a gap penalty of 4. A global alignment of the amino acid sequence of leukocyte Ig-like receptor-1 (LIR-1; Accession Number AAB63522; SEQ ID NO: 188) and the amino acid sequence of human MANGO 511 reveals that the amino acid sequences of human LIR-1 and human MANGO 511 are 24.2% identical. This alignment was performed using the ALIGN alignment program with a PAM120 scoring matrix, a gap length penalty of 12, and a gap penalty of 4.

[0409] FIGS. 227A-227C depicts an alignment of the nucleotide sequence of the coding region of LIR-1 (Accession Number AF009221; SEQ ID NO: 189) and the nucleotide sequence of the coding region of human MANGO 511. The nucleotide sequences of the coding regions of LIR-1 and human MANGO 511 are 34.0% identical. The full-length nucleic acid sequence of MANGO 511 and the coding region of LIR-1 are 44.0% identical. These alignments were performed using the ALIGN alignment program with a PAM120 scoring matrix, a gap length penalty of 12, and a gap penalty of 4.

[0410] FIGS. 228A-228C depicts the cDNA sequence of TANGO 361 and the predicted amino acid sequence of TANGO 361 (SEQ ID NO: 146). The open reading frame of TANGO 361 extends from nucleotides 41 to 1309 of SEQ ID NO: 145.

[0411] FIG. 229 depicts a hydropathy plot of TANGO 361, the details of which are described herein.

[0412] FIG. 230 depicts the cDNA sequence of TANGO 499 form 1, variant 1 and the predicted amino acid sequence of TANGO 499 form 1, variant 1 (SEQ ID NO: 148). The open reading frame of TANGO 499 form 1, variant 1 extends from nucleotides 83 to 844 of SEQ ID NO: 147.

[0413] FIG. 231 depicts a hydropathy plot of TANGO 499 form 1, variant 1, the details of which are described herein.

[0414] FIG. 232 shows an alignment of the human TANGO 499 form 1, variant 1 amino acid sequence with the artemin amino acid sequence. The alignment shows that there is a 23.5% overall amino acid sequence identity between TANGO 499 form 1, variant 1 and Artemin. This alignment was performed using the ALIGN alignment program with a PAM120 scoring matrix, a gap length penalty of 12, and a gap penalty of 4.

[0415] FIG. 233 shows an alignment of the human TANGO 499 form 1, variant 1 amino acid sequence with the riboflavin binding protein amino acid sequence. The alignment shows that there is a 19.9% overall amino acid sequence identity between TANGO 499 form 1, variant 1 and riboflavin binding protein (SEQ ID NO: 190). This alignment was performed using the ALIGN alignment program with a PAM120 scoring matrix, a gap length penalty of 12, and a gap penalty of 4.

[0416] FIG. 234 depicts the cDNA sequence of TANGO 499 form 2, variant 3 and the predicted amino acid sequence of TANGO 499 form 2, variant 3 (SEQ ID NO: 150). The open reading frame of TANGO 499 form 2, variant 3 extends from nucleotides 144 to 830 of SEQ ID NO: 149.

[0417] FIG. 235 depicts a hydropathy plot of TANGO 499 form 2, variant 3, the details of which are described herein.

[0418] FIG. 236 shows an alignment of the TANGO 499 form 1, variant 1 amino acid sequence with the TANGO 499 form 2, variant 3 amino acid sequence. The alignment shows an alternative spliced exon which is present in form 1 and absent in form 2 and that there is a 90.2% overall amino acid sequence identity between human TANGO 499 form 1, variant 1 and the TANGO 499 form 2, variant 3. This alignment was performed using the ALIGN alignment program with a PAM120 scoring matrix, a gap length penalty of 12, and a gap penalty of 4.

[0419] FIG. 237 depicts a cDNA sequence of human TANGO 315 form 1 and the predicted human TANGO 315 form 1 amino acid sequence encoded by the sequence (SEQ ID NO: 152). The open reading frame of TANGO 315, form 1, comprises nucleotide 1 to nucleotide 888 of SEQ ID NO: 151.

[0420] FIG. 238 depicts a hydropathy plot of human TANGO 315 form 1, the details of which are described herein.

[0421] FIG. 239 depicts an alignment of the amino acid of the human TANGO 315 form 1 and the amino acid sequence of CD33 (NP_{—}001763; SEQ ID NO: 191). The alignment shows that there is a 59.4% overall amino acid sequence identity between TANGO 315 form 1 sequence and CD33. This alignment was performed using the ALIGN alignment program with a PAM120 scoring matrix, a gap length penalty of 12, and a gap penalty of 4.

[0422] FIGS. 240A-240B depicts an alignment of the nucleotide sequence of the coding region of CD33 (NM_{—}001772; SEQ ID NO: 192) and the nucleotide sequence of the coding region of human TANGO 315 form 1. The nucleotide sequences of the coding regions of CD33 and human TANGO 315 form 1 are 75.8% identical. The nucleic acid sequence of CD33 (NM_{—}001772) and the human TANGO 315 form 1 nucleic acid sequence are 67.7% identical. These alignments were performed using the ALIGN alignment program with a PAM120 scoring matrix, a gap length penalty of 12, and a gap penalty of 4.

[0423] FIG. 241 depicts an alignment of the amino acid of TANGO 315 form 1 and the amino acid sequence of OB-BP-1 (Accession Number AAB70702; SEQ ID NO: 193). The alignment shows that there is a 52.8% overall amino acid sequence identity between the TANGO 315 form 1 sequence and Ob binding protein. This alignment was performed using the ALIGN alignment program with a PAM120 scoring matrix, a gap length penalty of 12, 25 and a gap penalty of 4.

[0424] FIGS. 242A-242B depicts an alignment of the nucleotide sequence of human TANGO 315 form 1 coding region and the nucleotide sequence of human OB-BP-1 coding region (Accession Number U71382; SEQ ID NO: 194). The nucleotide sequences of the coding regions are 74.2% identical. The nucleotide sequence of the TANGO 315 form 1 and the human OB-BP-1 cDNA (Accession Number U71382) have an overall sequence identity of 65%. These alignments were performed using the ALIGN alignment program with a PAM120 scoring matrix, a gap length penalty of 12, and a gap penalty of 4.

[0425] FIGS. 243A-243B depicts a cDNA sequence of human TANGO 315 form 2 and the predicted TANGO 315 form 2 amino acid sequence (SEQ ID NO: 154). The open reading frame of TANGO 315, form 2, comprises nucleotide 58 to nucleotide 888 of SEQ ID NO: 153.

[0426] FIG. 244 depicts a hydropathy plot of TANGO 315 form 2, the details of which are described herein.

[0427] FIG. 245 depicts an alignment of the amino acid of the TANGO 315 form 2 and the amino acid sequence of CD33 (NP_{—}001763; SEQ ID NO: 195). The alignment shows that there is a 62% overall amino acid sequence identity between the TANGO 315 form 2 sequence and CD33. This alignment was performed using the ALIGN alignment program with a PAM120 scoring matrix, a gap length penalty of 12, and a gap penalty of 4.

[0428] FIGS. 246A-246B depicts a local alignment of the nucleotide sequence of CD33 (NM_{—}001772) and the nucleotide sequence of human TANGO 315 form 2. The nucleotide sequences of CD33 and human TANGO 315 form 2 are 75.4% identical. These alignments were performed using the ALIGN alignment program with a PAM120 scoring matrix, a gap length penalty of 12, and a gap penalty of 4.

[0429] FIG. 247 depicts an alignment of the amino acid of the TANGO 315 form 2 and the amino acid sequence of OB-BP-1 (Accession Number AAB70702; SEQ ID NO: 193). The alignment shows that there is a 53.3% overall amino acid sequence identity between the TANGO 315 form 2 sequence and Ob binding protein. This alignment was performed using the ALIGN alignment program with a PAM120 scoring matrix, a gap length penalty of 12, and a gap penalty of 4.

[0430] FIGS. 248A-248B depicts an alignment of the nucleotide sequence of human TANGO 315 form 2 coding region and the nucleotide sequence of human OB-BP-1 coding region (Accession Number U71382; SEQ ID NO: 195). The nucleotide sequences of the coding regions are 73.2% identical. These alignments were performed using the ALIGN alignment program with a PAM120 scoring matrix, a gap length penalty of 12, and a gap penalty of 4.

[0431] FIGS. 249A-249D depicts a cDNA sequence of TANGO 330 form 1 and the predicted human TANGO 330 form 1 amino acid sequence encoded by the sequence (SEQ ID NO: 156). The open reading frame of TANGO 330, form 1, comprises nucleotide 2 to nucleotide 2803 of SEQ ID NO: 155.

[0432] FIGS. 250A-250C depicts a cDNA sequence of TANGO 330 form 2 and the predicted of human TANGO 330 form 2 amino acid sequence encoded by the sequence (SEQ ID NO: 158). The open reading frame of TANGO 330 form 2 comprises nucleotide 9 to nucleotide 1448 of SEQ ID NO: 157.

[0433] FIGS. 251A-251G depicts a local alignment of the nucleotide sequence of human Roundabout; Accession Number AF040990; SEQ ID NO: 196) and the nucleotide sequence of the human TANGO 330 form 1. The nucleotide sequence of the human Roundabout and the human TANGO 330 form 1 nucleotide sequence are 56.9% identical.

[0434] FIGS. 252A-252B depicts an alignment of the amino acid sequence of human Roundabout (Accession Number AAC39575; SEQ ID NO: 197) and the amino acid sequence of the human TANGO 330 form 1. The amino acid sequence of the human Roundabout and the human TANGO 330 form 1 are 26.6% identical. This alignment was performed using the ALIGN alignment program with a PAM120 scoring matrix, a gap length penalty of 12, and a gap penalty of 4.

[0435] FIGS. 253A-253F depicts an alignment of the nucleotide sequence of the TANGO 330 form 1 and the nucleotide sequence of the human TANGO 330 form 2. The nucleotide sequences of TANGO 330 form 1 and TANGO 330 form 2 are 97.4% identical. These alignments were performed using the ALIGN alignment program with a PAM120 scoring matrix, a gap length penalty of 12, and a gap penalty of 4.

[0436] FIG. 254 depicts an alignment of the amino acid sequence of the TANGO 330 form 1 and the amino acid sequence of the TANGO 330 form 2. When the amino acid sequence of TANGO 330 form 2 is aligned with the amino acid sequence of TANGO 330 form 1, the fragments that are aligned are 94.1% identical. This alignment was performed using the ALIGN alignment program with a PAM120 scoring matrix, a gap length penalty of 12, and a gap penalty of 4.

[0437] FIGS. 255A-255D depicts the nucleotide sequence of human TANGO 437 with the predicted amino acid sequence of human TANGO 437 (SEQ ID NO: 160). The open reading frame of human TANGO 437 extends from nucleotide 43 to nucleotide 1815 of SEQ ID NO: 159.

[0438] FIG. 256 depicts a hydropathy plot of human TANGO 437, the details of which are described herein.

[0439] FIGS. 257A-257B depicts a local alignment of the nucleotide sequence of the coding region of human TANGO 437 with the nucleotide sequence of Gene 100 published in PCT Application No. W098/39448 (V59610; SEQ ID NO: 198). Nucleic acids 101 to 798 of the nucleotide sequence of the coding region of human TANGO 437 and nucleic acids 1 to 573 of the nucleotide sequence of Gene 100 are 54.6% identical. Nucleic acids 1851 to 3679 of the full-length nucleotide sequence of TANGO 437 and nucleic acids 1 to 1751 of the nucleotide sequence of Gene 100 are 74.1% identical. These alignments were performed using the ALIGN alignment program with a PAM120 scoring matrix, a gap length penalty of 12, and a gap penalty of 4.

[0440] FIGS. 258A-258B depicts the cDNA sequence of TANGO 480 and the predicted amino acid sequence of TANGO 480 (SEQ ID NO: 162). The open reading frame of TANGO 480 extends from nucleotide 43 to nucleotide 621 of SEQ ID NO: 161.

[0441] FIG. 259 depicts a hydropathy plot of TANGO 480, the details of which are described herein.

[0442] FIGS. 260A-260E depicts the nucleotide sequence of human TANGO 437-form 2 with the predicted amino acid sequence of human TANGO 437-form 2 (SEQ ID NO: 164). The open reading frame of human TANGO 437-form 2 extends from nucleotide 43 to nucleotide 2298 of SEQ ID NO: 163.

[0443] FIG. 261 depicts a hydropathy plot of human TANGO 437-form 2, the details of which are described herein.

### DETAILED DESCRIPTION OF THE INVENTION

[0444] The INTERCEPT 258, INTERCEPT 307 and INTERCEPT 340, MANGO 003, MANGO 245, MANGO 346, MANGO 347, MANGO 349, and MANGO 511, and TANGO 128, TANGO 136, TANGO 140, TANGO 176, TANGO 197, TANGO 201, TANGO 204, TANGO 206, TANGO 209, TANGO 212, TANGO 213, TANGO 214, TANGO 216, TANGO 221, TANGO 222, TANGO 223, TANGO 224, TANGO 244, TANGO 246, TANGO 253, TANGO 257, TANGO 261, TANGO 262, TANGO 266, TANGO 267, TANGO 272, TANGO 275, TANGO 295, TANGO 315, TANGO 330, TANGO 339, TANGO 354, TANGO 358, TANGO 361, TANGO 365, TANGO 368, TANGO 369, TANGO 378, TANGO 383, TANGO 437, TANGO 480, and TANGO 499 proteins and nucleic acid molecules comprise families of molecules having certain conserved structural and functional features among family members. Examples of conserved structural domains include signal sequence (or signal peptide or secretion signal), transmembrane domains, cytoplasmic domains and extracellular domains.

[0445] As used herein, the terms “family” or “families” are intended to mean two or more proteins or nucleic acid molecules having a common structural domain and having sufficient amino acid or nucleotide sequence identity as defined herein. Family members can be from either the same or different species. For example, a family can comprise two or more proteins of human origin, or can comprise one or more proteins of human origin and one or more of non-human origin. Members of the same family may also have common structural domains.

[0446] As used herein, a “signal sequence” includes a peptide of at least about 15 or 20 amino acid residues in length which occurs at the N-terminus of secretory and membrane-bound proteins and which contains at least about 70% hydrophobic amino acid residues such as alanine, leucine, isoleucine, phenylalanine, proline, tyrosine, tryptophan, or valine. In a preferred embodiment, a signal sequence contains at least about 10 to 40 amino acid residues, preferably about 19-34 amino acid residues, and has at least about 60-80%, more preferably at least about 65-75%, and more preferably at least about 70% hydrophobic residues. A signal sequence serves to direct a protein containing such a sequence to a lipid bilayer. A signal sequence is usually cleaved during processing of the mature protein.

[0447] As used herein, a “transmembrane domain” refers to an amino acid sequence having at least about 25 to 40 amino acid residues in length and which contains hydrophobic amino acid residues such as alanine, leucine, isoleucine, phenylalanine, proline, tyrosine, tryptophan, or valine. In a preferred embodiment, a transmembrane domain contains at least about 25 to 40 amino acid residues, preferably about 25-30 amino acid residues, and has at least about 60-80% hydrophobic residues.

[0448] As used herein, a “cytoplasmic loop” includes an amino acid sequence located within a cell or within the cytoplasm of a cell and is typically associated with a transmembrane protein segment which extends through the cellular membrane to the extracellular region.

[0449] As used herein, an “extracellular domain” is a protein structural domain which is part of a transmembrane protein and resides outside the cell membrane, or is extracytoplasmic. A protein which has more than one transmembrane domain likewise has more than one extracellular domain. When located at the N-terminal domain the extracellular domain is referred to herein as an “N-terminal extracellular domain”. As used herein, an “N-terminal extracellular domain” includes an amino acid sequence. The N-terminal extracellular domain can be at least 10 amino acids in length or more, about 25, about 50, about 100, about 150, about 250, about 300, about 350, about 400, about 450, about 500, about 550, about 600, about 650, about 700, or more than about 750 amino acids.

[0450] The N-terminal extracellular domain is located outside of a cell or is extracellular. The C-terminal amino acid residue of a “N-terminal extracellular domain” is adjacent to an N-terminal amino acid residue of a transmembrane domain in a naturally-occurring protein. Preferably, the N-terminal extracellular domain is capable of interacting (e.g., binding to) with an extracellular signal, for example, a ligand (e.g., a glycoprotein hormone) or a cell surface receptor (e.g., an integrin receptor). Most preferably, the N-terminal extracellular domain mediates a variety of biological processes, for example, protein-protein interactions, signal transduction and/or cell adhesion.

[0451] TANGO 136

[0452] The present invention is based in part on the discovery of cDNA molecules encoding mouse and human TANGO 136, a transmembrane protein.

[0453] A cDNA encoding a portion of mouse TANGO 136 was identified using a screening process which selects for nucleotide sequences which encode secreted proteins. A detailed description of this method, called “signal trapping” is provided in PCT Publication No. WO 98/22491, published May 28, 1998. In brief, a randomly primed cDNA library was prepared using cDNA prepared from mRNA extracted from lipopolysaccharide-stimulated mouse macrophages. To prepare this library, the cDNA was inserted into the mammalian expression vector pMEAP adjacent to a cDNA encoding placental alkaline phosphatase which lacks a secretory signal. Next, the cDNA library was amplified in bacteria. The amplified cDNA was then isolated and transfected into human 293T cells. After 28 hours, cell supernatants were collected and assayed for alkaline phosphatase activity. Clones giving rise to detectable alkaline phosphatase activity in the supernatant of transfected cells were isolated and analyzed further by sequencing and the novel clones subjected to further sequencing.

[0454] One such clone, mouse TANGO 136, was identified. This clone includes a 1813 nucleotide cDNA (FIGS. 1A-1D; SEQ ID NO: 1). The open reading frame of this cDNA (nucleotides 89 to 1813 of SEQ ID NO: 1) encodes a 575 amino acid putative type I membrane protein (SEQ ID NO: 2). Because no translation stop codon occurs at the end of the open reading frame, this cDNA is likely to be a partial cDNA which does not encode the most carboxy terminal portion of mouse TANGO 136.

[0455] The signal peptide prediction program SIGNALP (Nielsen et al. (1997) Protein Engineering 10:1-6) predicted that mouse TANGO 136 includes a 17 amino acid signal peptide (amino acid 1 to about amino acid 17 of SEQ ID NO: 2) preceding the 558 amino acid (partial) mature protein (about amino acid 18 to amino acid 575 of SEQ ID NO: 2). Mature mouse TANGO 136 has an extracellular domain (amino acids 18 to 441 of SEQ ID NO: 2); a transmembrane domain (about amino acids 442 to 462 of SEQ ID NO: 2); and a cytoplasmic domain (about amino acids 463 to 575 of SEQ ID NO: 2).

[0456] The extracellular region of mouse TANGO 136 includes two CUB-like domains (amino acids 32 to 86 and amino acids 193 to 306 of SEQ ID NO: 2). CUB domains are extracellular domains found in a number of functionally diverse, developmentally regulated proteins including the dorsal-ventral patterning protein tolloid, bone morphogenetic protein 1, a family of spermadhesins, complement subcomponents Cls/Clr and the neuronal recognition molecule A5. The majority of CUB domains contain four conserved cysteines which are thought to form two disulfide bridges (C1-C2 and C3-C4) (Bork et al. (1993) J. Mol. Biol. 231:539-545). The first CUB-like domain of mouse TANGO 136 (amino acids 32 to 86 of SEQ ID NO: 2) includes two cysteines, and the second CUB-like domain of mouse TANGO 136 (amino acids 193 to 306 of SEQ ID NO: 2) includes two cysteines. Alignments of the CUB-like domains of mouse TANGO 136 with a CUB domain consensus sequence are depicted in FIG. 8.

[0457] FIG. 2 depicts a hydropathy plot of a portion of mouse TANGO 136.

[0458] Human TANGO 136

[0459] Mouse TANGO 136 cDNA described above was used to screen a human placental cDNA library to identify human clones encoding TANGO 136. One clone identified by this screening was sequenced fully. This human TANGO 136 cDNA (FIGS. 3A-3E; SEQ ID NO: 3) includes an open reading frame (nucleotides 541 to 2679 of SEQ ID NO: 3) encoding a 713 amino acid putative type I transmembrane protein (SEQ ID NO: 4).

[0460] The signal peptide prediction program SIGNALP (Nielsen et al. (1997) Protein Engineering 10:1-6) predicted that human TANGO 136 includes a 16 amino acid signal peptide (amino acid 1 to about amino acid 16 of SEQ ID NO: 4) preceding the 697 amino acid mature protein (about amino acid 17 to amino acid 713 of SEQ ID NO: 4). Human TANGO 136 has an extracellular domain (amino acids 17 to 440 of SEQ ID NO: 4); a transmembrane domain (amino acids 441 to 461 of SEQ ID NO: 4); and a cytoplasmic domain (amino acids 462 to 713 of SEQ ID NO: 4).

[0461] A clone, pT136, which encodes human TANGO 136 was deposited with the American Type Culture Collection (10801 University Boulevard, Manassas, Va. 20110-2209) on Sep. 11, 1998 and assigned Accession Number 98880. This deposit will be maintained under the terms of the Budapest Treaty on the International Recognition of the Deposit of Microorganisms for the Purposes of Patent Procedure. This deposit was made merely as a convenience for those of skill in the art and is not an admission that a deposit is required under 35 U.S.C. §112.

[0462] The extracellular region of human TANGO 136 includes two CUB-like domains (amino acids 31 to 136 and amino acids 192 to 305 of SEQ ID NO: 4). Both of the CUB-like domains of human TANGO 136 include two cysteines. Alignments of the CUB-like domains of human TANGO 136 with a CUB domain consensus sequence are depicted in FIG. 9.

[0463] The extracellular region of human TANGO 136 also includes four LDL receptor class A domains (amino acids 138 to 176, amino acids 328 to 355; amino acids 380 to 398; and amino acids 399 to 435 of SEQ ID NO: 4). The LDL receptor class A domain is an approximately 40 amino acid cysteine-rich domain having a found in LDL receptor and other members of the LDL receptor family. Repeats of this domain are thought to involved in ligand binding (Yamamoto et al. (1984) Cell 39:27-38; and Fass et al. (1997) Nature 388:691-693). The LDL receptor class A domain extending from amino acid 380 to 398 of human TANGO 136 has relatively weak homology to the consensus LDL receptor type A domain compared to the other three LDL receptor class A domains. Alignments of the LDL receptor class A domains of human TANGO 136 with a LDL receptor class A domain consensus sequence are depicted in FIG. 10.

[0464] FIG. 4 depicts a hydropathy plot of human TANGO 136.

[0465] Mature human TANGO 136 has a predicted MW of 76.7 kDa (78.4 kDa for immature human TANGO 136), not including post-translational modifications.

[0466] Human TANGO 136 maps to chromosome 14 near D14S283.

[0467] The amino acid sequence of human TANGO 136 was used to search public databases (using BLASTP; Altschul et al. (1990) J. Mol Biol. 215:403-410) in order to identify proteins having homology to human TANGO 136. This analysis revealed that both mouse and human TANGO 136 has considerable homology to human LDL receptor related protein LRp105/LRP-3 (Ishii et al. (1998) Genomics 51:132-135). FIGS. 5A-5B depicts an alignment of the amino acids sequences of mouse TANGO 136, human TANGO 136, human LRp105/LRP-3, and rat Lrp105/LRP-3.

[0468] When compared using the algorithm of Myers and Miller ((1988) CABIOS 4:11-17; PAM120 scoring matrix, −12 gap opening penalty, −4 gap extension penalty) mouse TANGO 136 is 34.4% identical to human LRp105/LRP-3 and 34% identical to rat LRp105/LRP-3; human TANGO 136 is 38% identical to human LRp105/LRP-3 and 37.6% identical to rat Lrp105/LRP-3; and human TANGO 136 is 72.6 identical to mouse TANGO 136.

[0469] The full length human TANGO 136 nucleotide sequence is 86.1% identical (FASTA version 2.0 u53; Pearson and Lipman (1988) Proc. Natl Acad. Sci. USA 85:2444-2448) to the partial mouse TANGO 136 nucleotide sequence (FIGS. 6A-6E). The full length human TANGO 136 amino acid sequence is 90.8% identical (FASTA version 2.0 u53; Pearson and Lipman (1988) Proc. Natl Acad. Sci. 85:2444-2448) to the partial mouse TANGO 136 amino acid sequence (FIGS. 7A-7B). As shown in FIGS. 7A-7B, the protein domain structure (described above) is highly conserved between the human and mouse proteins.

[0470] Human multiple tissue northern (MTN) blots (Clontech, Palo Alto, Calif.), containing 2 mg of poly A+ RNA per lane were probed with a mouse TANGO 136 cDNA probe. This analysis revealed that TANGO 136 mRNA is relatively highly expressed in spleen, prostate, uterus, peripheral blood leukocytes, heart, placenta, kidney and pancreas. This analysis also revealed that TANGO 136 mRNA is expressed at a somewhat lower level in thymus, testis, colon, lung, liver and skeletal muscle. TANGO 136 nucleic acids, polypeptides, agonists, and antagonists can be used to modulate the activities of the tissues in which it is expressed and thus treat disorders of these tissues. For example, TANGO 136 is expressed in prostate and testis and may be involved in spermatogenesis.

[0471] Use of TANGO 136 Nucleic Acids, Polypeptides, and TANGO 136 Agonists or Antagonists

[0472] Due to the homology between TANGO 136 and LRp105/LRP-3, TANGO 136 is predicted to be a member of the low density lipoprotein receptor family, which includes LDLR, LRP-2 (megalin/gp330), LRP-3 (LRp105), LRP-5, LRP-6, and LR8B. Members of this family are endocytic receptors that bind and internalize ligands from the circulation and extracellular space. Since TANGO 136 is predicted to be a member of the low density lipoprotein receptor family, it may function similarly to other members of the low density lipoprotein receptor family.

[0473] LDLR binds plasma lipoproteins that contain apolipoprotein B-100 (apoB-100) or apoE on their surface. LDLR is critical for the uptake of these lipoproteins, and mutations in LDLR are the cause of familial hypercholesterolemia, a disorder characterized by high levels of cholesterol-rich LDL in the plasma. The elevation of plasma cholesterol levels in patients afflicted with familial hypercholesterolemia leads to atherosclerosis and increased risk for myocardial infarction. TANGO 136 potentially plays a role in disorders of lipoprotein metabolism and transport, e.g., cardiovascular diseases such as atherosclerosis. Accordingly, TANGO 136 nucleic acids, polypeptides and TANGO 136 antagonists and agonists are useful for treatment of disorders of lipoprotein metabolism and transport, e.g., cardiovascular diseases such as atherosclerosis.

[0474] In vitro studies have shown that LRP-2 is capable of binding and mediating the cellular uptake of a large number of different ligands including apoE-enriched very low density lipoproteins (Willnow et al. (1992) J. Biol. Chem. 267:26172-26180), complexes of urokinase plasminogen activator and plasminogen activator inhibitor-1 (tPA:PAI-1) (Willnow et al., supra), lipoprotein lipase (Willnow et al., supra), and lactoferrin. A receptor associated protein known as RAP (Orlando et al. (1992) Proc. Natl Acad. Sci. 89:6698-6702) inhibits the binding of these ligands to LRP-2. Some or all of these ligands may bind TANGO 136. Accordingly, TANGO 136 nucleic acids, polypeptides, antagonists and agonists are useful for treatment of clotting disorders, e.g., inhibiting clot formation or dissolving clots.

[0475] A few specific and physiologically relevant ligands for LRP-2 have been identified, including apolipoprotein J (apoJ)/clusterin (Kounnas et al. (1995) J. Biol. Chem. 22:13070-13075) and thyroglobulin (Zheng et al. (1998) Endocrinology 139:1462-1465). ApoJ has been reported to bind several proteins, including the bA4 peptide of the Alzheimer's precursor protein, a subclass of high density lipoprotein, and the complement membrane attack complex C5-C9 (Kounnas et al., supra). The clearance of apoj complexed with these and other molecules is expected to occur via LRP-2. Thus, LRP-2 may play an important functional role in the clearance of these complexes. For example, LRP-2 may function to target lipoproteins for clearance or may inhibit the cytolytic activity of the complement membrane C5b-C9 by clearing the apoJ/C5b-C9 complex. The fact that LRP-2 can bind the apoJ/amyloid-β complex suggests that LRP-2 may be involved in regulating the pathogenesis of Alzheimer's disease. A role for LRP-2 in Alzheimer's disease is further supported by another study that showed that LRP-2 may be involved in transporting the apoJ/amyloid-β complex across the blood-brain-barrier (Zlokovic et al. (1996) Proc. Natl Acad. Sci. 93:4229-4234). Thus, TANGO 136 nucleic acids, proteins, agonists, and antagonists are useful for the treatment of Alzheimer's disease and other neurodegenerative disorders, e.g., Huntington's disease and Parkinson's disease.

[0476] LRP-2 is involved in participating in the endocytosis of thyroglobulin, which results in the release of thyroid hormones (Zheng et al. (1998) Endocrinolgy 139:1462-65). TANGO 136 may also be involved in the regulating the release of thyroid hormones. Thus, TANGO 136 nucleic acids, proteins, agonists, and antagonists are useful for the treatment of thyroid disorders, e.g., thyroid hormone release disorders.

[0477] LRP-2 is also predicted to play a role as a drug receptor and is thought to be involved in the uptake of polybasic drugs, e.g., aprotinin, aminoglycosides and polymyxin B. The uptake of polybasic drugs can be toxic, e.g., the administration of aminoglycosides is often associated with nephro- and ototoxicity. TANGO 136 may also mediate uptake of polybasic drugs, and TANGO 136 nucleic acids, proteins, agonists, and antagonists are useful for the modulating the uptake of such drugs. TANGO 136 can also be used to design less toxic versions of such drugs.

[0478] In addition, LRP-2 is involved in the pathogenesis of Heymann Nephritis nephropathy (HN), an autoimmune glomerular disease, which is similar to human membranous nephropathy. It is thought that LRP-2 is the major pathogenic antigen and forms an antigen-antibody complex between the glomular basement membrane and the foot processes of glomerular epithelial cells. The presence of the antigen-antibody complex leads to extensive damage of the basement membrane and proteinuria (Farquhar et al. (1994) Ann. N.Y. Acad. Sci. 97-106). Similar to LRP-2, TANGO 136 may play a pathogenic role in autoimmune glomerular disease. Thus, TANGO 136 nucleic acids, proteins, agonists, and antagonists are useful for the treatment of autoimmune glomerular disease.

[0479] LRP-5 and LRP-6 are thought to function in endocytosis. Based on genetic evidence, LRP-5 and possibly LRP-6 are thought to play a role in the molecular pathogenesis of type I diabetes (Brown et al. (1998) Biochem. Biophys. Res. Comm. 248:879-888). TANGO 136 is also likely plays a role in type I diabetes. Thus, TANGO 136 nucleic acids, proteins, agonists, and antagonists are useful for the treatment of type I diabetes.

[0480] LR8B is expressed in brain and might be involved in brain-specific lipid transport. Brain-specific lipid transport may involve apoE4, which is associated with Alzheimer's disease. TANGO 136 may also be involved in brain-specific lipid transport, and TANGO 136 nucleic acids, proteins, agonists, and antagonists are useful for the treatment of Alzheimer's disease.

[0481] In general, TANGO 136 nucleic acids, proteins, agonists, and antagonists may be useful for the treatment of neurological disorders, e.g., neurodegenerative disorders and neuropsychiatric disorders. Examples of neurodegenerative disorders include Alzheimer's disease, Parkinson's disease, and Huntington's disease. Examples of neuropsychiatric disorders include schizophrenia, attention deficit disorder, unipolar affective (mood) disorder, bipolar affective (mood) disorders (e.g., severe bipolar affective disorder (BP-I) and bipolar affective disorder with hypomania and major depression (BP-II)), and schizoaffective disorders.

[0482] TANGO 128

[0483] In one aspect, the present invention is based on the discovery of cDNA molecules which encode a novel family of proteins having sequence identity to vascular endothelial growth factor (VEGF), referred to herein as TANGO 128 proteins.

[0484] For example, the VEGF family to which the TANGO 128 proteins of the invention bear sequence identity, are a family of mitogens which contain a platelet-derived growth factor (PDGF) domain having conserved cysteine residues. These cysteine residues form intra- and inter-chain disulfide bonds which can affect the structural integrity of the protein. Thus, included within the scope of the invention are TANGO 128 proteins having a platelet-derived growth factor (PDGF) domain. As used herein, a PDGF-domain refers to an amino acid sequence of about 55 to 80, preferably about 60 to 75, 65 to 70, and more preferably about 69 amino acids in length. A PDGF domain of TANGO 128 extends, for example, from about amino acids 269 to 337 of SEQ ID NO: 6.

[0485] Conserved amino acid motifs, referred to herein as “consensus patterns” or “signature patterns”, can be used to identify TANGO 128 family members (and/or PDGF family members) having a PDGF domain. For example, the following signature pattern can be used to identify TANGO 128 family members: P-x-C-[LV]-x(3)-R-C-[GSTA]-G-x(0, 3)-C-C. The signature patterns or consensus patterns described herein are described according to the following designation: all amino acids are indicated according to their universal single letter designation; “x” designates any amino acid; x(n) designates n number of amino acids, e.g., x(2) designates any two amino acids, e.g., x(1, 3) designates any of one to three amino acids; and, amino acids in brackets indicates any one of the amino acids within the brackets, e.g., [LV] indicates any of one of either L (leucine) or V (valine). TANGO 128 has such a signature pattern at about amino acids 272 to 287 of SEQ ID NO: 6.

[0486] A PDGF domain further contains at least about 2 to 10, preferably, 3 to 9, 4 to 8, or 6 to 7 conserved cysteine residues. By alignment of a TANGO 128 family member with a PDGF consensus sequence, conserved cysteine residues can be found. For example, as shown in FIG. 25, there is a first cysteine residue in the PDGF consensus sequence that corresponds to a cysteine residue at amino acid 274; there is a second cysteine residue in the PDGF consensus sequence that corresponds to a cysteine residue at amino acid 280 of TANGO 128; there is a third cysteine residue in the PDGF consensus sequence that corresponds to a cysteine residue at amino acid 286 of TANGO 128; there is a fourth cysteine residue in the PDGF consensus sequence that corresponds to a cysteine residue at amino acid 287 of TANGO 128; there is a fifth cysteine residue in the PDGF consensus sequence that corresponds to a cysteine residue at amino acid 296 of TANGO 128; there is a sixth cysteine residue in the PDGF consensus sequence that corresponds to a cysteine residue at amino acid 335 of TANGO 128; and/or there is a seventh cysteine residue in the PDGF consensus sequence that corresponds to a cysteine residue at amino acid 337 of TANGO 128. The PDGF consensus sequence is also available from the HMMer version 2.0 software as Accession Number PF00341. Software for HMM-based profiles is available from http://www.csc.ucsc.edu/research/compbio/sam.html and from http://genome.wustl.edu/eddy/hmmer.html.

[0487] The present invention also features TANGO 128 proteins having a CUB domain. The CUB domain is associated with various developmentally regulated proteins and as such is likely to be involved in developmental processes. As used herein, a CUB domain refers to an amino acid sequence of about 90 to about 140, preferably about 100 to 125, 110 to 115, and more preferably about 113 amino acids in length. A CUB domain of TANGO 128 extends, for example, from about amino acids 48 to 160 of SEQ ID NO: 6. An alignment of TANGO 128 and the CUB consensus sequence is shown in FIG. 26.

[0488] Conserved amino acid motifs, referred to herein as “consensus patterns” or “signature patterns”, can be used to identify TANGO 128 family members having a CUB domain. For example, the following signature pattern can be used to identify TANGO 128 family members: GS-x(3, 11)-[ST]-[PLYA]-x(2)-P-x(2,3)-Y-x(6, 8)-[WY]-x(9, 11)-[LVIF]-x-[LIF]-x(7,10)-C. TANGO 128 has such a signature pattern at about amino acids 56 to 104 of SEQ ID NO: 6.

[0489] A CUB domain further contains at 2 or more conserved cysteine residues which are likely to form disulfide bonds which affect the structural integrity of the protein. Also included within the scope of the present invention are TANGO 128 proteins having a signal sequence.

[0490] In certain embodiments, a TANGO 128 family member has the amino acid sequence of SEQ ID NO: 2, and the signal sequence is located at amino acids 1 to 20, 1 to 21, 1 to 22, 1 to 23 or 1 to 24. In such embodiments of the invention, the domains and the mature protein resulting from cleavage of such signal peptides are also included herein. For example, the cleavage of a signal sequence consisting of amino acids 1 to 22 results in a mature TANGO 128 protein corresponding to amino acids 23 to 345. The signal sequence is normally cleaved during processing of the mature protein.

[0491] In one embodiment, a TANGO 128 protein of the invention includes a PDGF domain and/or a CUB domain. In another embodiment, a TANGO 128 protein of the 10 invention includes a PDGF domain, a CUB domain, a signal sequence, and is secreted.

[0492] Human TANGO 128

[0493] The cDNA encoding human TANGO 128 was isolated by homology screening. Briefly, a clone encoding a portion of TANGO 128 was identified through high throughput screening of a mesangial cell library and showed homology to the VEGF family. An additional screen of the mesangial cell library was performed to obtain a clone comprising full length human TANGO 128. Human TANGO 128 includes a 2839 nucleotide cDNA (FIGS. 11A-11D; SEQ ID NO: 5). It is noted that the nucleotide sequence depicted in SEQ ID NO: 5 contains SalI and NotI adapter sequences on the 5′ and 3′ ends, respectively (5′GTCGACCCACGCGTCCG 3′, and 5′ GGGCGGCCGC 3′). Thus, it is to be understood that the nucleic acid molecules of the invention include not only those sequences with such adaptor sequences but also the nucleic acid sequences described herein lacking the adaptor sequences. The open reading frame of this cDNA (nucleotides 288 to 1322 of SEQ ID NO: 5) encodes a 345 amino acid secreted protein (SEQ ID NO: 6).

[0494] The signal peptide prediction program SIGNALP (Nielsen et al. (1997) Protein Engineering 10:1-6) predicted that human TANGO 128 includes a 22 amino acid signal peptide (amino acids 1 to amino acid 22) preceding the mature TANGO 128 protein (corresponding to amino acid 23 to amino acid 345).

[0495] Human TANGO 128 includes a PDGF domain from about amino acids 269 to 337. Human TANGO 128 further includes a CUB domain (about amino acids 48 to 160).

[0496] A clone, EpDH237, which encodes human TANGO 128 was deposited as part of EpDHMixl with the American Type Culture Collection (ATCC®, 10801 University Boulevard, Manassas, Va. 20110-2209) on Nov. 20, 1998 which was assigned Accession Number 98999. This deposit will be maintained under the terms of the Budapest Treaty on the International Recognition of the Deposit of Microorganisms for the Purposes of Patent Procedure. This deposit was made merely as a convenience to those of skill in the art and is not an admission that a deposit is required under 35 U.S.C. §112.

[0497] FIG. 18 depicts a hydropathy plot of human TANGO 128. The hydrophobic region at the beginning of the plot which corresponds to about amino acids 1 to 22 is the signal sequence of TANGO 128.

[0498] Northern analysis of human TANGO 128 mRNA expression revealed the presence of approximately a 3.8 kb transcript that is expressed in a wide range of tissues including heart, brain, placenta, lung, liver, skeletal muscle, kidney, pancreas, spleen, prostate, testis, ovary, small intestine, colon, and peripheral blood leukocytes. The highest levels of expression were seen in the pancreas, kidney and ovary. An additional TANGO 128 transcript of approximately 3 kb is seen in the ovary, prostate, pancreas, and kidney.

[0499] The human gene for TANGO 128 was mapped on radiation hybrid panels to the long arm of chromosome 4, in the region q28-31. Flanking markers for this region are WI-3936 and AFMCO27ZB9. The FGC (fibrinogen gene cluster), GYP (glycophorin cluster), IL15 (interleukin 15), TDO2 (tryptophan oxygenase), and MLR (mineralcorticoid receptor) genes also map to this region of the human chromosome. This region is syntenic to mouse chromosome 8. The Q (quinky), pdw (proportional dwarf), and lyl1 (lymphoblastomic leukemia) loci also map to this region of the mouse chromosome. Il15 (interlukin 15), mlr (mineral corticoid receptor), ucp (uncoupling protein), and clgn (calmegin) genes also map to this region of the mouse chromosome.

[0500] TANGO 128 protein binds to endothelial cells with high affinity: In vitro studies of AP-T128 binding to bACE cells (bovine adrenal cortical capillary endothelial cells) were performed with Phospha-Light chemiluminescent assay system (Tropix, Inc. Bedford, Mass.). bACE cells were plated into gelatinized 96-well plates (3000 cells/well) and allowed to grow to confluency. The cells were then fixed with acetone. AP-hT128 was incubated with the cells for 1 hour. Specific binding was detected with a microplate luminometer according to the manufacturer's instruction.

[0501] The binding studies indicated high affinity to bovine adrenal capillary endothelial cells in culture. Half-maximal binding occurred with approximately 0.5 nM AP-T128. AP-30 T128 was capable of exhibiting binding to adrenal cortex, ovary (medulla), mucosal layer of colon, and bronchial epithelium of lung in the mouse.

[0502] Recombinant TANGO 128 protein stimulates endothelial cell proliferation In vitro: The ability of Al protein to stimulate the growth of endothelial cells was tested by bovine adrenal capillary endothelial (bACE) cell proliferation assay. Briefly, cultured bovine capillary endothelial cells dispersed with 0.05% trypsin/0.53 mM EDTA were plated onto gelatinized (Difco) 24-well culture plates (12,500 cell/well) in DMEM containing 10% bovine calf serum (BCS) and incubated for 24 hours. The media was replaced with 0.5 ml DMEM containing 5% bovine calf serum and either buffer only or buffer containing AP-hT128 were added. After 72 hours, the cells were counted with Coulter Counter. By cell count, there is a modest increase in bACE cells after 3 days. TANGO 128 was shown to exhibit proliferative activity on endothelial cells In vitro. Preliminary studies show that AP-T128 has mitogenic activity on primary bovine adrenal cortical capillary endothelial cells (bACE cells).

[0503] Mouse TANGO 128

[0504] A mouse homolog of human TANGO 128 was identified. A cDNA encoding mouse TANGO 128 was identified by analyzing the sequences of clones present in a mouse osteoblast lipopolysaccharide (LPS) stimulated cDNA library. This analysis led to the identification of a clone, jtmoal 14h01, encoding full-length mouse TANGO 128. The mouse TANGO 128 cDNA of this clone is 764 nucleotides long (FIGS. 33A-33B; SEQ ID NO: 19). It is noted that the nucleotide sequence contains Sal I and Not I adapter sequences on the 5′ and 3′ ends, respectively. The open reading frame of this cDNA (nucleotides 211 to 750 of SEQ ID NO: 19) encodes a 179 amino acid secreted protein (SEQ ID NO: 20).

[0505] In one embodiment of a nucleotide sequence of mouse TANGO 128, the nucleotide at position 595 is a guanine (G). In this embodiment, the amino acid at position 129 is glycine (G). In another embodiment of a nucleotide sequence of mouse TANGO 128, the nucleotide at position 595 is a cytosine (C). In this embodiment, the amino acid at position 129 is arginine (R). In another embodiment of a nucleotide sequence of mouse TANGO 128, the nucleotide at position 595 is a thymidine (T). In this embodiment, the amino acid at position 129 is a stop codon (Opal) and results in a polypeptide of 128 aa in length.

[0506] In one embodiment of a nucleotide sequence of mouse TANGO 128, the nucleotide at position 710 is a thymidine (T). In this embodiment, the amino acid at position 167 is valine (V). In another embodiment of a nucleotide sequence of mouse TANGO 128, the nucleotide at position 710 is a cytosine (C). In this embodiment, the amino acid at position 167 is alanine (A). In another embodiment of a nucleotide sequence of mouse TANGO 128, the nucleotide at position 710 is adenine (A). In this embodiment, the amino acid at position 167 is glutamine (E). In another embodiment of a nucleotide sequence of mouse TANGO 128, the nucleotide at position 710 is guanine (G). In this embodiment, the amino acid at position 167 is glycine (G).

[0507] In one embodiment of a nucleotide sequence of mouse TANGO 128, the nucleotide at position 725 is a thymidine (T). In this embodiment, the amino acid at position 172 is leucine (L). In another embodiment of a nucleotide sequence of mouse TANGO 128, the nucleotide at position 725 is a cytosine (C). In this embodiment, the amino acid at position 172 is serine (S). In another embodiment of a nucleotide sequence of mouse TANGO 128, the nucleotide at position 725 is a adenine (A). In this embodiment, the amino acid at position 172 is a stop codon (Amber) and results in a polypeptide of 171 aa in length. In another embodiment of a nucleotide sequence of mouse TANGO 128, the nucleotide at position 725 is a guanine (G). In this embodiment, the amino acid at position 172 is tryptophan.

[0508] In situ tissue screening was performed on mouse adult and embryonic tissue to analyze the expression of mouse TANGO 128 mRNA. Of the tissues tested, expression in the adult mouse was highest in the reproductive tract, testes and ovary.

[0509] In the case of adult expression, the following results were obtained: For the testis, a signal outlining some seminiferous tubules was detected which possibly included the lamina propria which contains fibromyocytes (myoid cells). In the placenta, a signal was detected in the labyrinthine tissue. In the ovaries, a strong, multifocal signal was detected. A weak signal was detected from the capsule of the adrenal gland. In the spleen, a ubiquitous signal was detected which was slighter higher in the non-follicular spaces. A weak, ubiquitous signal was detected in the submandibular gland. Weak expression was also seen in a number of other tissues. For example, a very weak signal was detected in the olfactory bulb of the brain. A very weak ubiquitous signal only slightly above background was detected in the colon, small intestine, and liver. A multifocal signal was detected in brown and white fat. No signal was detected in the following tissues: eye and harderian gland, spinal cord, stomach, thymus, skeletal muscle, bladder, heart, lymph node, lung, pancreas, and kidney.

[0510] Embryonic expression was seen in a number of tissues. The highest expressing tissue was the capsule of the kidney which was seen at E14.5 and continues to P1.5. Adult kidney did not show this expression pattern. Other tissues with strong expression include the frontal cortex and developing cerebellum of the brain, various cartilage structures of the head including Meckel's cartilage and the spinal column. Numerous tissues with a smooth muscle component also showed expression including the small intestine and stomach as well as the diaphragm at early embryonic stages, E13.4 and E14.5. At E13.5, signal in the brain was seen in areas adjacent to the ventricles, which includes the roof of the midbrain and the roof of the neopallial cortex. A stronger signal was observed from the skin of the snout and follicles of vibrissae extending to the epithelium of the mouth and tongue. A diffuse signal around developing clavicle, hip, and vertebrae was suggestive of muscle expression. A signal did not appear to be expressed from developing bone or cartilage except in the case of the spinal column where there may have been some cartilage expression. Large airways of the lung were positive as is the diaphragm, stomach and intestines. A signal from the digestive tract appeared to be associated with smooth muscle. At E14.5, the expression pattern was nearly identical to that seen at E13.5 except kidney expression was now apparent. Signal was restricted to the capsule and was the strongest expressing tissue. The capsule of the adrenal gland had expression but to a lesser extent than that seen in the kidney. The developing musculature of the feet had strong expression as well. At E16.5, signal in the muscle and skin was decreased. Diaphragm expression was no longer apparent but the smooth muscle of the intestine was still seen. Strongest signal was seen in the skin and muscle of the snout and feet, capsule of the kidney, the frontal cortex, and the cerebellar promordium. Signal from lung had decreased and become ubiquitous. At E17.5, signal was most apparent in the frontal cortex and cerebellar primordium of the brain, the snout, Meckel's cartilage, submandibular gland, spinal column, and capsule of the kidney which had the strongest signal. Signal was also seen from the smooth muscle of the gut. At E18.5, the pattern was nearly identical to that seen at E17.5. At P1.5, the pattern was very similar to that seen at E17.5 and 18.5 with strongest signal seen from Meckel's cartilage, basiocippital and basisphenoid bone, spinal column, developing cerebellum, and capsule of the kidney. By this stage of development, expression in most other tissues and organs had dropped to nearly background levels.

[0511] Human and mouse TANGO 128 sequences exhibit considerable similarity at the protein, nucleic acid, and open reading frame levels. An alignment (made using the ALIGN software (Myers and Miller (1989) CABIOS, ver. 2.0); BLOSUM 62 scoring matrix; gap penalties −12/−4), reveals a protein identity of 77.8%. The human and mouse TANGO 128 full length cDNAs are 83.3% identical, as assessed using the same software and parameters as indicated (without the BLOSUM 62 scoring matrix). In the respective ORFs, calculated in the same fashion as the full length cDNAs, human and mouse TANGO 128 are 81.3% identical.

[0512] Uses of TANGO 128 Nucleic Acids, Polypeptides and Modulators Thereof

[0513] The TANGO 128 proteins of the invention bear some similarity to the VEGF family of growth factors. Accordingly, TANGO 128 proteins likely function in a similar manner as members of the VEGF family. Thus, TANGO 128 modulators can be used to treat any VEGF-associated disorders and modulate normal VEGF functions.

[0514] VEGF family members play a role in angiogenesis and endothelial cell growth. For example, VEGF is an endothelial cell specific mitogen and has been shown to be a potent angiogenic factor. Ferrara et al. (1992) Endocr. Rev. 13:18-32. Thus, several studies have reported that VEGF family members can serve as regulators of normal and pathological angiogenesis. Olofsson et al. (1996) Proc. Natl. Acad. Sci. USA 93:2576-2581; Berse et al. (1992) Mol. Biol. Cell. 3:211-220; Shweiki et al. (1992) Nature 359:843-845. Similarly, the TANGO 128 proteins of the invention likely play a role in angiogenesis. Accordingly, the TANGO 128 proteins, nucleic acids and/or modulators of the invention are useful angiogenic modulators. For example, the TANGO 128 proteins, nucleic acids and/or modulators can be used in the treatment of wounds, e.g., modulate wound healing, and/or the regrowth of vasculature, e.g., the regrowth of vasculature into ischemic organs, e.g., such as in coronary bypass. In addition, TANGO 128 proteins, nucleic acids and/or modulators can be used to promote growth of cells in culture for cell based therapies.

[0515] Angiogenesis is also involved in pathological conditions including the growth and metastasis of tumors. In fact, tumor growth and metastasis have been shown to be dependent on the formation of new blood vessels. Accordingly, TANGO 128 polypeptides, nucleic acids and/or modulators thereof can be used to modulate angiogenesis in proliferative disorders such as cancer, (e.g., fibrosarcoma, myxosarcoma, liposarcoma, chondrosarcoma, osteogenic sarcoma, chordoma, angiosarcoma, endotheliosarcoma, lymphangiosarcoma, lymphangioendotheliosarcoma, synovioma, mesothelioma, Ewing's tumor, leimyosarcoma, rhabdotheliosarcoma, colon sarcoma, pancreatic cancer, breast cancer, ovarian cancer, prostate cancer, squamous cell carcinoma, basal cell carcinoma, adenocarcinoma, sweat gland carcinoma, sebaceous gland carcinoma, papillary carcinoma, papillary adenocarcinomas, cystadenocarcinoma, medullary carcinoma, bronchogenic carcinoma, renal cell carcinoma, hematoma, bile duct carcinoma, melanoma, choriocarcinoma, semicoma, embryonal carcinoma, Wilms' tumor, cervical cancer, testicular tumor, lung carcinoma, small cell carcinoma, bladder carcinoma, epithelial carcinoma, glioma, astrocytoma, medulloblastoma, craniopharyngioma, ependynoma, pinealoma, hemangioblastoma, and retinoblastoma.

[0516] Because TANGO 128 is expressed in the reproductive tract, particularly in the ovaries and testis, the TANGO 128 polypeptides, nucleic acids and/or modulators thereof can be used to modulate the function, morphology, proliferation and/or differentiation of cells in the tissues in which it is expressed. For example, such molecules can be used to treat or modulate disorders associated with the testis including, without limitation, the Klinefelter syndrome (both the classic and mosaic forms), XX male syndrome, variococele, germinal cell aplasia (the Sertoli cell-only syndrome), idiopathic azoospermia or severe oligospermia, crpytochidism, and immotile cilia syndrome, or testicular cancer (primary germ cell tumors of the testis). In another example, TANGO 128 polypeptides, nucleic acids, or modulators thereof, can be used to treat testicular disorders, such as unilateral testicular enlargement (e.g., nontuberculous, granulomatous orchitis), inflammatory diseases resulting in testicular dysfunction (e.g., gonorrhea and mumps), and tumors (e.g., germ cell tumors, interstitial cell tumors, androblastoma, testicular lymphoma and adenomatoid tumors).

[0517] For example, the TANGO 128 polypeptides, nucleic acids and/or modulators thereof can be used modulate the function, morphology, proliferation and/or differentiation of the ovaries. For example, such molecules can be used to treat or modulate disorders associated with the ovaries, including, without limitation, ovarian tumors, McCune-Albright syndrome (polyostotic fibrous dysplasia). For example, the TANGO 128 polypeptides, nucleic acids and/or modulators can be used in the treatment of infertility.

[0518] The TANGO 128 polypeptides, nucleic acids and/or modulators thereof can be used to modulate the function, morphology, proliferation and/or differentiation of cells in the tissues of the reproductive tract other than the ovaries and testis. For example, such molecules can be used to treat or modulate disorders associated with the female reproductive tract including, without limitation, uterine disorders, e.g., hyperplasia of the endometrium, uterine cancers (e.g., uterine leiomyomoma, uterine cellular leiomyoma, leiomyosarcoma of the uterus, malignant mixed mullerian Tumor of uterus, uterine Sarcoma), and dysfunctional uterine bleeding (DUB).

[0519] TANGO 140

[0520] In another aspect, the present invention is based on the discovery of cDNA molecules which encode a novel family of proteins referred to herein as TANGO 140 proteins. Described herein are TANGO 140-1, and TANGO 140-2 nucleic acid molecules and the corresponding polypeptides which the nucleic acid molecules encode.

[0521] For example, the tumor necrosis factor receptor (TNF-R) family to which the TANGO 140 proteins of the invention bear sequence similarity, are a family of cell surface proteins which function as receptors for cytokines and which contain conserved patterns of cysteine residues. Conserved cysteine residues, as used herein, refer to cysteine residues which are maintained within TANGO 140 family members (and/or TNF-R family members). This cysteine pattern is referred to herein as a tumor necrosis factor receptor (TNF-R) domain. These cysteine residues can form disulfide bonds which can affect the structural integrity of the protein. Thus, included within the scope of the invention are TANGO 140 proteins having at least one to four TNF-R domains, preferably two TNF-R domains. As used herein, a TNF-R domain refers to an amino acid sequence of about 25 to 50, preferably about 30 to 45, 30 to 40, and more preferably about 35 to 39 or 40 amino acids in length. A TNF-R domain of TANGO 140-1 extends, for example, from about amino acid 11 to amino acid 49 and/or from about amino acid 52 to amino acid 91; a TNF-R domain of TANGO 140-2 extends, for example, from about amino acid 25 to amino acid 63 and/or from about amino acid 66 to amino acid 105.

[0522] Conserved amino acid motifs, referred to herein as “consensus patterns” or “signature patterns”, can be used to identify TANGO 140 family members (and/or TNF-R family members) having a TNF-R domain. For example, the following signature pattern can be used to identify TANGO 140 family members: C-x(4, 6)-[FYH]-x(5, 10)-C-x(0, 2)-C-x(2, 3)-C-x(7, 11)-C-x(4, 6)-[DNEQSKP]-x(2)-C. The signature patterns or consensus patterns described herein are described according to Prosite Signature designation. Thus, all amino acids are indicated according to their universal single letter designation; “x” designates any amino acid; x(n) designates “n” number of amino acids, e.g., x(2) designates any two amino acids, e.g., x(4, 6) designates any four to six amino acids; and, amino acids in brackets indicates any one of the amino acids within the brackets, e.g., [FYH] indicates any of one of either F (phenylalanine), Y (tyrosine) or H (histidine). This consensus sequence can also be obtained as Prosite Accession Number PDOC00561. TANGO 140-1 has such a signature pattern at about amino acids 11 to 49 and at about amino acids 52 to 91 of SEQ ID NO: 8. TANGO 140-2 has such a signature pattern at about amino acids 25 to 63 and at amino acids 66 to 105 of SEQ ID NO: 10.

[0523] A TNF-R domain further contains at least about 2 to 10, preferably, 3 to 8, or 4 to 6 conserved cysteine residues. By alignment of a TANGO 140 family member with a TNF-R consensus sequence, conserved cysteine residues can be found. For example, as shown in FIG. 27, there is a first cysteine residue in the TNF-R consensus sequence that corresponds to a cysteine residue at amino acid 11 of the first TNF-R domain of TANGO 140-1; there is a second cysteine residue in the TNF-R consensus sequence that corresponds to a cysteine residue at amino acid 23 of the first TNF-R domain of TANGO 140-1; there is a third cysteine residue in the TNF-R consensus sequence that corresponds to a cysteine residue at amino acid 26 of the first TNF-R domain of TANGO 140-1; there is a fourth cysteine residue in the TNF-R consensus sequence that corresponds to a cysteine residue at amino acid 29 of the first TNF-R domain of TANGO 140-1; there is a fifth cysteine residue in the TNF-R consensus sequence that corresponds to a cysteine residue at amino acid 39 of the first TNF-R domain of TANGO 140-1; and/or there is a sixth cysteine residue in the TNF-R consensus sequence that corresponds to a cysteine residue at amino acid 49 of the first TNF-R domain of TANGO 140-1. In addition, conserved cysteine residues can be found at amino acids 52, 66, 69, 72, 83 and/or 91 of the second TNF-R domain of TANGO 140-1. Moreover, as shown in FIG. 28, conserved cysteine residues can be found at amino acids 25, 37, 40, 43, 53 and/or 63 of the first TNF-R domain of TANGO 140-2; and at amino acids 66, 80, 83, 86, 97 and/or 105 of TANGO-140-2. The TNF-R consensus sequence is available from the HMMer version 2.0 software as Accession Number PF00020. Software for HMM-based profiles is available from http://www.csc.ucsc.edu/research/compbio/sam.html and from http://genome.wustl.edu/eddy/hmmer.html.

[0524] The present invention also includes TANGO 140 proteins having a transmembrane domain. An example of a transmembrane domain includes from about amino acids 147 to 170 of TANGO 140-1.

[0525] Thus, in one embodiment, a TANGO 140 protein includes at least one TNF-R domain, preferably two, three or four TNF-R domains and is secreted. In another embodiment, a TANGO 140 protein of the invention includes at least one TNF-R domain, preferably two, three or four TNF-R domains, a transmembrane domain and is a membrane bound protein.

[0526] Human TANGO 140-1

[0527] A cDNA encoding a portion of human TANGO 140-1 was identified by screening a stimulated human mesangial library. Human TANGO 140-1 includes a 1550 nucleotide cDNA (FIGS. 12A-12B; SEQ ID NO: 7). It is noted that the nucleotide sequence contains a Not I adapter sequence on the 3′ end. The open reading frame of TANGO 140-1 (nucleotides 2 to 619 of SEQ ID NO: 7) encodes a 206 amino acid putative membrane protein (SEQ ID NO: 8).

[0528] In one embodiment, human TANGO 140-1 includes an extracellular domain (about amino acids 1 to 146 of SEQ ID NO: 8), a transmembrane (TM) domain (amino acids 147 to 170 of SEQ ID NO: 8); and a cytoplasmic domain (amino acids 171 to 206 of SEQ ID NO: 8). Alternatively, in another embodiment, a human TANGO 140-1 protein contains an extracellular domain at amino acid residues 1 to 146 of SEQ ID NO: 8, a transmembrane domain at amino acid residues 147 to 170 of SEQ ID NO: 8, and a cytoplasmic domain at amino acid residues 171 to 206 of SEQ ID NO: 8.

[0529] The extracellular region of human TANGO 140-1 includes TNF-R domains from about amino acids 11 to 49 and from about amino acids 52-91 of SEQ ID NO: 8.

[0530] A clone, EpDH137, which encodes human TANGO 140-1 was deposited as part of EpDHMixl with the American Type Culture Collection, 10801 University Boulevard, Manassas, Va. 20110-2209) on Nov. 20, 1998 which was assigned Accession Number 98999. This deposit will be maintained under the terms of the Budapest Treaty on the International Recognition of the Deposit of Microorganisms for the Purposes of Patent Procedure. This deposit was made merely as a convenience for those of skill in the art and is not an admission that a deposit is required under 35 U.S.C. §112.

[0531] FIG. 19 depicts a hydropathy plot of human TANGO 140-1. As shown in the hydropathy plot, amino acids 147 to 170 of SEQ ID NO: 8 correspond to a transmembrane domain of TANGO 140-1.

[0532] Human TANGO 140-2

[0533] An additional clone having significant homology to human TANGO 140-1 was identified. The clone was sequenced and is likely to be a splice variant of TANGO 140-1. This variant is referred to herein as TANGO 140-2. The human TANGO 140-2 includes a 3385 nucleotide cDNA (FIGS. 13A-13C; SEQ ID NO: 9). It is noted that the nucleotide sequence contains a Not I adapter sequence on the 3′ end. The open reading frame of TANGO 140-2 (nucleotides 1 to 622 of SEQ ID NO: 9) and encodes a 198 amino acid putative secreted protein (SEQ ID NO: 10).

[0534] Human TANGO 140-2 also includes TNF-R domains from about amino acids 25 to 63, and from about amino acids 66 to 105.

[0535] TANGO 140-1 and TANGO 140-2 are identical from TANGO 140-1 amino acids 6 to 150 and TANGO 140-2 amino acids 20 to 164, yet differ at each of their respective amino and carboxy ends. These two genes are most likely splice variants of overlapping genetic material.

[0536] A clone, EpDH185, which encodes human TANGO 140-2 was deposited as part of EpDHMixl with the American Type Culture Collection (10801 University Boulevard, Manassas, Va. 20110-2209) on Nov. 20, 1998 which was assigned Accession Number 98999. This deposit will be maintained under the terms of the Budapest Treaty on the International Recognition of the Deposit of Microorganisms for the Purposes of Patent Procedure. This deposit was made merely as a convenience for those of skill in the art and is not an admission that a deposit is required under 35 U.S.C. §112.

[0537] FIG. 20 depicts a hydropathy plot of TANGO 140-2.

[0538] Uses of TANGO 140 Nucleic Acids Polypeptides, and Modulators Thereof

[0539] The TANGO 140 proteins of the invention comprise a family of proteins having sequence similarity to members of the TNF-R superfamily. Thus, the TANGO 140 proteins of the invention are members of the TNF-R superfamily. Accordingly, TANGO 140 proteins likely function in a similar manner as members of the TNF-R family and TANGO 140 modulators can be used to treat any TNF-R/NGF-R-associated disorders.

[0540] For example, members of the tumor necrosis factor receptor (TNF-R) superfamily regulate a diverse range of cellular processes including cell proliferation, programmed cell death and immune responses. TNF-R family members are cell surface proteins which function as receptors for cytokines. Mallet et al. (1991) Immunology Today 12:220-223. For example, the binding of NGF to NGF-R causes neuronal differentiation and survival. Barde (1989) Neuron 2:1525-1534. Similarly, the TANGO 140 molecules of the invention can modulate neuronal differentiation and survival.

[0541] NGF (nerve growth factor) induces, inter alia, neurite outgrowth and promotes survival of embryonic sensory and sympathetic neurons. Nerve growth factor (NGF) is also involved in the development and maintenance of the nervous system. Thus, TANGO 140 polypeptides, nucleic acids and/or modulators thereof can be used to modulate the function, morphology, proliferation and/or differentiation of cells in the nervous system. Such molecules may be used in the treatment of neural disorders, including, without limitation, epilepsy, muscular dystrophy, and neurodegenerative diseases such as Alzheimer's disease, Parkinson's disease, and Huntington's disease).

[0542] In addition, both TGF-α and TGF-β bind to TGF-RI and TGF-RII, leading to a diverse range of effects including inflammation and tumor cell death. Beutler et al. (1989) Ann. Rev. Immunol. 7:625-655; Sprang (1990) Trends Biochem. Sci. 15:366-368. Thus, the TANGO 140 proteins of the invention are likely to bind directly or indirectly to a soluble protein, e.g., a cytokine, or membrane-bound protein, and play a role in modulating inflammation, cell proliferation, and/or apoptosis.

[0543] In light of the similarity of TANGO 140, TANGO 140 polypeptides, nucleic acids and/or modulators thereof can be used to treat TANGO 140 associated disorders which can include TNF-related disorders (e.g., acute myocarditis, myocardial infarction, congestive heart failure, T cell disorders (e.g., dermatitis, fibrosis)), immunological differentiative and apoptotic disorders (e.g., hyper-proliferative syndromes such as systemic lupus erythematosus (lupus)), and disorders related to angiogenesis (e.g., tumor formation and/or metastasis, cancer). Examples of types of cancers include benign tumors, neoplasms or tumors (such as carcinomas, sarcomas, adenomas or myeloid lymphoma tumors, e.g., fibrosarcoma, myxosarcoma, liposarcoma, chondrosarcoma, osteogenic sarcoma, chordoma, angiosarcoma, endotheliosarcoma, lymphangiosarcoma, lymphangioendotheliosarcoma, synovioma, mesothelioma, Ewing's tumor, leimyosarcoma, rhabdotheliosarcoma, colon sarcoma, pancreatic cancer, breast cancer, ovarian cancer, prostate cancer, squamous cell carcinoma, basal cell carcinoma, adenocarcinoma, sweat gland carcinoma, sebaceous gland carcinoma, papillary carcinoma, papillary adenocarcinomas, cystadenocarcinoma, medullary carcinoma, bronchogenic carcinoma, renal cell carcinoma, hematoma, bile duct carcinoma, melanoma, choriocarcinoma, semicoma, embryonal carcinoma, Wilms' tumor, cervical cancer, testicular tumor, lung carcinoma, small cell carcinoma, bladder carcinoma, epithelial carcinoma, glioma, astrocytoma, medulloblastoma, craniopharyngioma, ependynoma, pinealoma, hemangioblastoma, retinoblastoma), leukemias, (e.g. acute lymphocytic leukemia), acute myelocytic leukemia (myelolastic, promyelocytic, myelomonocytic, monocytic and erythroleukemia), chronic leukemias (chronic myelocytic (granulocytic) leukemia and chronic lymphocytic leukemia), or polycythemia vera, or lymphomas (Hodgkin's disease and non-Hodgkin's diseases), multiple myelomas and Waldenström's macroglobulinemia.

[0544] Moreover, as TANGO 140 is expressed in a stimulated mesangial library, the TANGO 140 polypeptides, nucleic acids and/or modulators thereof can be used to modulate the function, morphology, proliferation and/or differentiation of cells in the tissues in which it is expressed. Mesangial cells are known to play an important role in maintaining structure and function of the glomerulus and in the pathogenesis of glomerular diseases. Moreover, the local production of chemokines by mesangial cells has been linked to inflammatory processes within the glomerulus. Also, it is known that high glucose directly increases oxidative stress in glomerular mesangial cells, a target cell of diabetic nephropathy.

[0545] Thus, TANGO 140 polypeptides, nucleic acids and/or modulators thereof can be used to modulate the function, morphology, proliferation and/or differentiation of cells in the kidney. Such molecules can also be used to treat disorders associated with abnormal or aberrant metabolism or function of cells in the kidney. Therefore, such molecules can be used to treat or modulate renal (kidney) disorders, such as glomerular diseases (e.g., acute and chronic glomerulonephritis, rapidly progressive glomerulonephritis, nephrotic syndrome, focal proliferative glomerulonephritis, glomerular lesions associated with systemic disease, such as systemic lupus erythematosus, Goodpasture's syndrome, multiple myeloma, diabetes, neoplasia, sickle cell disease, and chronic inflammatory diseases), tubular diseases (e.g., acute tubular necrosis and acute renal failure, polycystic renal diseasemedullary sponge kidney, medullary cystic disease, nephrogenic diabetes, and renal tubular acidosis), tubulointerstitial diseases (e.g., pyelonephritis, drug and toxin induced tubulointerstitial nephritis, hypercalcemic nephropathy, and hypokalemic nephropathy) acute and rapidly progressive renal failure, chronic renal failure, nephrolithiasis, vascular diseases (e.g., hypertension and nephrosclerosis, microangiopathic hemolytic anemia, atheroembolic renal disease, diffuse cortical necrosis, and renal infarcts), or tumors (e.g., renal cell carcinoma and nephroblastoma).

[0546] TANGO 197

[0547] In one aspect, the present invention is based on the discovery of cDNA molecules which encode a novel family of proteins referred to herein as TANGO 197 proteins.

[0548] For example, the type A module superfamily, which includes proteins of the extracellular matrix and various proteins with adhesive function, have a von Willebrand factor type A (vWF) domain to which the TANGO 197 proteins of the invention bear similarity. This domain allows for the interaction between various cells and/or extracellular matrix (ECM) components. Thus, included within the scope of the invention are TANGO 197 proteins having a von Willebrand factor type A (vWF) domain. As used herein, a vWF domain refers to an amino acid sequence of about 150 to 200, preferably about 160 to 190, 170 to 180, and more preferably about 172 to 175 amino acids in length. A vWF domain of TANGO 197 extends, for example, from about amino acids 44 to 215.

[0549] Conserved amino acid motifs, referred to herein as “consensus patterns” or “signature patterns”, can be used to identify TANGO 197 family members having a vWF domain. For example, the following signature pattern can be used to identify TANGO 197 family members: D-x(2)-F-[ILV]-x-D-x-S-x(2, 3)-[ILV]-x(10, 12)-F. The signature patterns or consensus patterns described herein are described according to the following designation: all amino acids are indicated according to their universal single letter designation; “x” designates any amino acid; x(n) designates “n” number of amino acids, e.g., x(2) designates any two amino acids, e.g., x(2, 3) designates any of two to three amino acids; and, amino acids in brackets indicates any one of the amino acids within the brackets, e.g., [ILV] indicates any of one of either I (isoleucine), L (leucine) or V (valine). TANGO 197 has such a signature pattern at about amino acids 44 to 65.

[0550] An alignment of TANGO 197 and the vWF consensus sequence is shown in FIG. 29. The vWF consensus sequence is available from the HMMer 2.0 software as Accession Number PF00092. Software for HMM-based profiles is available from http://www.csc.ucsc.edu/research/compbio/sam.html and from http://genome.wustl. edu/eddy/hmmer.html.

[0551] Also included within the scope of the present invention are TANGO 197 proteins having a signal sequence.

[0552] In certain embodiments, a TANGO 197 family member has the amino acid sequence of SEQ ID NO: 12, and the signal sequence is located at amino acids 1 to 25, 1 to 26, 1 to 27, 1 to 28, or 1 to 29. In such embodiments of the invention, the domains and the mature protein resulting from cleavage of such signal peptides are also included herein. Thus, in another embodiment, a TANGO 197 protein contains a signal sequence of about amino acids 1 to 27 which results in an extracellular domain consisting of amino acids 28 to 301, and a mature TANGO 197 protein corresponding to amino acids 28 to 333 of SEQ ID NO: 12. The signal sequence is normally cleaved during processing of the mature protein.

[0553] Human TANGO 197

[0554] A cDNA encoding a portion of human TANGO 197 was identified by screening a human fetal lung library. An additional screen of an osteoclast library was performed to obtain a clone comprising a full length human TANGO 197. Human TANGO 197 includes a 2272 nucleotide cDNA (FIGS. 14A-14C; SEQ ID NO: 11). It is noted that the nucleotide sequence contains Sal I and Not I adapter sequences on the 5′ and 3′ ends, respectively. The open reading frame of this cDNA (nucleotides 213 to 1211 of SEQ ID NO: 11) encodes a 333 amino acid transmembrane protein (SEQ ID NO: 12).

[0555] The signal peptide prediction program SIGNALP (Nielsen et al. (1997) Protein Engineering 10:1-6) predicted that human TANGO 197 includes a 27 amino acid signal peptide (amino acids 1 to about amino acid 27 of SEQ ID NO: 12) preceding the mature TANGO 197 protein (corresponding to about amino acid 28 to amino acid 333 of SEQ ID NO: 12).

[0556] Human TANGO 197 includes a vWF domain from about amino acids 44 to 215 of SEQ ID NO: 12.

[0557] A clone, EpDH213, which encodes human TANGO 197 was deposited as part of EpDHMix1 with the American Type Culture Collection (ATCC®, 10801 University Boulevard, Manassas, Va. 20110-2209) on Nov. 20, 1998 which was assigned Accession Number 98999. This deposit will be maintained under the terms of the Budapest Treaty on the International Recognition of the Deposit of Microorganisms for the Purposes of Patent Procedure. This deposit was made merely as a convenience to those of skill in the art and is not an admission that a deposit is required under 35 U.S.C. §112.

[0558] FIG. 21 depicts a hydropathy plot of human TANGO 197. As shown in the hydropathy plot, the hydrophobic region at the beginning of the plot which corresponds to about amino acids 1 to 27 is the signal sequence of TANGO 197.

[0559] In one embodiment, human TANGO 197 protein is a transmembrane protein that contains an extracellular domain at amino acid residues 28-301 of SEQ ID NO: 12, a transmembrane domain at amino acid residues 302 to 319 of SEQ ID NO: 12, and a cytoplasmic domain at amino acid residues 320-333 of SEQ ID NO: 12. Alternatively, in another embodiment, a human TANGO 197 protein contains an extracellular domain at amino acid residues 320 to 333 of SEQ ID NO: 12, a transmembrane domain at amino acid residues 302 to 319 of SEQ ID NO: 12, and a cytoplasmic domain at amino acid residues 1 to 301 of SEQ ID NO: 12.

[0560] Northern analysis of human TANGO 197 mRNA expression revealed expression in a wide variety of tissues such as brain, skeletal muscle, colon, thymus, spleen, kidney, liver, and the small intestine. The highest levels of expression were seen in tissues such as the heart, placenta and lung. There was no expression of the transcript in peripheral blood leukocytes.

[0561] Mouse TANGO 197

[0562] A mouse homolog of human TANGO 197 was identified. A cDNA encoding mouse TANGO 197 was identified by analyzing the sequences of clones present in a mouse testis (Sertoli TM4 cells) cDNA library. This analysis led to the identification of a clone, jtmzb062c08, encoding full-length mouse TANGO 197. The mouse TANGO 197 cDNA of this clone is 4417 nucleotides long (FIGS. 34A-34D; SEQ ID NO: 23). It is noted that the nucleotide sequence contains a Not I adapter sequence on the 3′ end. The open reading frame of this cDNA (nucleotides 3-1145 of SEQ ID NO: 23) encodes a 381 amino acid transmembrane protein (SEQ ID NO: 24).

[0563] In one embodiment, mouse TANGO 197 protein is a transmembrane protein that contains an extracellular domain at amino acid residues 161 to 381 of SEQ ID NO: 24, a transmembrane domain at amino acid residues 139 to 160 of SEQ ID NO: 24, and a cytoplasmic domain at amino acid residues 1 to 138 of SEQ ID NO: 24. Alternatively, in another embodiment, a mouse TANGO 197 protein contains an extracellular domain at amino acid residues 1 to 139 of SEQ ID NO: 24, a transmembrane domain at amino acid residues139 to 160 of SEQ ID NO: 24, and a cytoplasmic domain at amino acid residues 161 to 381 of SEQ ID NO: 24.

[0564] Expression of mouse TANGO 197 mRNA was detected by a library array procedure. Briefly, the library array procedure entailed preparing a PCR mixture by adding to the standards reagents (Taq Polymerase, dNTPs, and PCR buffer) a vector primer, a primer internal to the gene of interest, and an aliquot of a library in which expression was to be tested. This procedure was performed with many libraries at a time in a 96 well PCR tray, with 80 or more wells containing libraries and a control well in which the above primers were combined with the clone of interest itself. The control well served as an indicator of the fragment size to be expected in the library wells, in the event the clone of interest was expressed within. Amplification was performed in a PCR machine, employing standard PCR conditions for denaturing, annealing, and elongation, and the resultant mixture was mixed with an appropriate loading dye and run on an ethidium bromide-stained agarose gel. The gel was later viewed with UV light after the DNA loaded within its lanes had time to migrate into the gels. Lanes in which a band corresponding with the control band was visible indicated the libraries in which the clone of interest was expressed.

[0565] Results of the library array procedure revealed strong expression in the choroid plexus, 12.5 day whole mouse embryo, LPS-stimulated osteoblast tissue, hyphae stimulated long term bone marrow cells. Weak expression was detected in TM4 (Sertoli cells), from testis, esophagus, LPS-stimulated osteoblast tissue. No expression was detected in differentiated 3T3, 10.5 day mouse fetus, mouse kidney fibrosis model, nephrotoxic serum (NTS), LPS-stimulated heart, LPS-stimulated osteoblasts, lung, mouse insulinoma (Nit-1), normal/hyperplastic islets (pancreas), normal spleen, 11.5 day mouse, LPS-stimulated lung, hypertropic heart, LPS-stimulated kidney, LPS-stimulated lymph node, mc/9 mast cells, 13.5 day mouse, LPS-stimulated anchored heart, normal thymus, Th2-ovarian-Tg, Balb C liver (bile duct ligation d2), normal heart, brain polysome (MPB), LPS-stimulated anchored liver, brain (EAE d10 model), th1-ovarian-Tg, heart, hypothalamus, lone term bone, marrow cells, megakaryocyte, LPS-stimulated spleen, hyphae-stimulated long term bone marrow, lung, angiogenic pancreatic islets, Th2, brain, LPS-stimulated thymus, LPS-stimulated microglial cells, testes (random-primed), tumor pancreatic islets, LPS-stimulated brain, LPS-stimulated alveolar macrophage cell line, mouse lung bleomycin model, pregnant uterus, and hypothalamus nuclei.

[0566] Human and mouse TANGO 197 sequences exhibit considerable similarity at the protein, nucleic acid, and open reading frame levels. An alignment (made using the ALIGN software {Myers and Miller (1989) CABIOS, ver. 2.0}; BLOSUM 62 scoring matrix; gap penalties −12/−4), reveals a protein identity of 88.0%. The human and mouse TANGO 197 full length cDNAs are 52.8% identical, as assessed using the same software and parameters as indicated (without the BLOSUM 62 scoring matrix). In the respective ORFs, calculated in the same fashion as the full length cDNAs, human and mouse TANGO 197 are 51.6% identical.

[0567] Uses of TANGO 197 Nucleic Acids, Polypeptides, and Modulators Thereof

[0568] As TANGO 197 exhibits expression in the lung, TANGO 197 polypeptides, nucleic acids, or modulators thereof, can be used to treat pulmonary (lung) disorders, such as atelectasis, pulmonary congestion or edema, chronic obstructive airway disease (e.g., emphysema, chronic bronchitis, bronchial asthma, and bronchiectasis), diffuse interstitial diseases (e.g., sarcoidosis, pneumoconiosis, hypersensitivity pneumonitis, Goodpasture's syndrome, idiopathic pulmonary hemosiderosis, pulmonary alveolar proteinosis, desquamative interstitial pneumonitis, chronic interstitial pneumonia, fibrosing alveolitis, hamman-rich syndrome, pulmonary eosinophilia, diffuse interstitial fibrosis, Wegener's granulomatosis, lymphomatoid granulomatosis, and lipid pneumonia), or tumors (e.g., bronchogenic carcinoma, bronchiolovlveolar carcinoma, bronchial carcinoid, hamartoma, and mesenchymal tumors).

[0569] Morever, as a species isoform of TANGO 197 was also isolated from a testis library, TANGO 197 polypeptides, nucleic acids, or modulators thereof, can be used to treat testicular disorders, examples of which are described elsewhere in this disclosure.

[0570] As discussed above, the vWF domain of TANGO 197 is involved in cellular adhesion and interaction with extracellular matrix (ECM) components. Proteins of the type A module superfamily which incorporate a vWF domain participate in multiple ECM and cell/ECM interactions. For example, proteins having a vWF domain have been found to play a role in cellular adhesion, migration, homing, pattern formation and/or signal transduction after interaction with several different ligands (Colombatti et al. (1993) Matrix 13:297-306).

[0571] Similarly, the TANGO 197 proteins of the invention likely play a role in various extracellular matrix interactions, e.g., matrix binding, and/or cellular adhesion. Thus, a TANGO 197 activity is at least one or more of the following activities: 1) regulation of extracellular matrix structuring; 2) modulation of cellular adhesion, either in vitro or in vivo; 3) regulation of cell trafficking and/or migration. Accordingly, the TANGO 197 proteins, nucleic acid molecules and/or modulators can be used to modulate cellular interactions such as cell-cell and/or cell-matrix interactions and thus, to treat disorders associated with abnormal cellular interactions.

[0572] TANGO 197 polypeptides, nucleic acids and/or modulators thereof can also be used to modulate cell adhesion in proliferative disorders, such as cancer. Examples of types of cancers include benign tumors, neoplasms or tumors (such as carcinomas, sarcomas, adenomas or myeloid lymphoma tumors, e.g., fibrosarcoma, myxosarcoma, liposarcoma, chondrosarcoma, osteogenic sarcoma, chordoma, angiosarcoma, endotheliosarcoma, lymphangiosarcoma, lymphangioendotheliosarcoma, synovioma, mesothelioma, Ewing's tumor, leimyosarcoma, rhabdotheliosarcoma, colon sarcoma, pancreatic cancer, breast cancer, ovarian cancer, prostate cancer, squamous cell carcinoma, basal cell carcinoma, adenocarcinoma, sweat gland carcinoma, sebaceous gland carcinoma, papillary carcinoma, papillary adenocarcinomas, cystadenocarcinoma, medullary carcinoma, bronchogenic carcinoma, renal cell carcinoma, hematoma, bile duct carcinoma, melanoma, choriocarcinoma, semicoma, embryonal carcinoma, Wilms' tumor, cervical cancer, testicular tumor, lung carcinoma, small cell carcinoma, bladder carcinoma, epithelial carcinoma, glioma, astrocytoma, medulloblastoma, craniopharyngioma, ependynoma, pinealoma, hemangioblastoma, retinoblastoma), leukemias, (e.g. acute lymphocytic leukemia), acute myelocytic leukemia (myelolastic, promyelocytic, myelomonocytic, monocytic and erythroleukemia), chronic leukemias (chronic myelocytic (granulocytic) leukemia and chronic lymphocytic leukemia), or polycythemia vera, or lymphomas (Hodgkin's disease and non-Hodgkin's diseases), multiple myelomas and Waldrenström's macroglobulinemia.

[0573] TANGO 212

[0574] In another aspect, the present invention is based on the discovery of cDNA molecules which encode a novel family of proteins referred to herein as TANGO 212 proteins.

[0575] For example, the EGF family to which the TANGO 212 proteins of the invention bear sequence similarity, are a family of mitogens which contain a conserved pattern of cysteine residues. Conserved cysteine residues, as used herein, refer to cysteine residues which are maintained within TANGO 212 family members (and/or EGF family members). This cysteine pattern is referred to herein as an epidermal growth factor (EGF) domain. These cysteine residues form disulfide bonds which can affect the structural integrity of the protein. Thus, included within the scope of the invention are TANGO 212 proteins having at least one, preferably two, three, four, or five EGF domain(s). As used herein, an EGF-domain refers to an amino acid sequence of about 25 to 50, preferably about 30 to 45, 30 to 40, and more preferably about 31, 35, 36 to 40 amino acids in length.

[0576] Conserved amino acid motifs, referred to herein as “consensus patterns” or “signature patterns”, can be used to identify TANGO 212 family members (and/or EGF family members) having an EGF domain. For example, the following signature pattern referred to herein as a EGF-like consensus sequence, can be used to identify TANGO 212 family members: C-x-C-x(5, 11)-G-x(2, 3)-C. TANGO 212 has such a signature pattern at about amino acids 80 to 91, amino acids 156 to 172, amino acids 200 to 217 and/or amino acids 245 to 258. An EGF domain of TANGO 212 extends, for example, from about amino acids 61 to 91, from about amino acids 98 to 132, from about amino acids 138 to 172, from about amino acids 178 to 217, and/or from about amino acids 223 to 258 of SEQ ID NO: 14.

[0577] An EGF domain further contains at least about 2 to 10, preferably, 3 to 9, 4 to 8, or 6 to 7 conserved cysteine residues. By alignment of a TANGO 212 family member with an EGF-like consensus sequence, conserved cysteine residues can be found. For example, as shown in FIG. 30, there is a first cysteine residue in the EGF-like consensus sequence that corresponds to a cysteine residue at amino acid 61 of the first EGF domain of TANGO 212; there is a second cysteine residue in the EGF-like consensus sequence that corresponds to a cysteine residue at amino acid 69 of the first EGF domain of TANGO 212; there is a third cysteine residue in the EGF-like consensus sequence that corresponds to a cysteine residue at amino acid 74 of the first EGF domain of TANGO 212; there is a fourth cysteine residue in the EGF-like consensus sequence that corresponds to a cysteine residue at amino acid 80 of the first EGF domain of TANGO 212; there is a fifth cysteine residue in the EGF-like consensus sequence that corresponds to a cysteine residue at amino acid 82 of the first EGF domain of TANGO 212; and/or there is a sixth cysteine residue in the EGF-like consensus sequence that corresponds to a cysteine residue at amino acid 91 of the first EGF-domain of TANGO 212. In addition, conserved cysteine residues can be found at amino acids 98, 105, 109, 118, 120 and/or 132 of the second EGF domain of TANGO 212; at amino acids 138, 143, 147, 156, 158 and/or 172 of the third EGF domain of TANGO 212; at amino acids 178, 185, 191, 200, 202 and/or 217 of the fourth EGF domain of TANGO 212; and at amino acids 223, 230, 236, 245, 247 and/or 258 of the fifth EGF domain of TANGO 212 (SEQ ID NO: 14). The EGF-like consensus sequence is available from the HMMer version 2.0 software as Accession Number PF00008. Software for HMM-based profiles is available from http://www.csc.ucsc.edu/research/compbio/sam.html and from http://genome.wustl.edu/eddy/hmmer.html.

[0578] The present invention also features TANGO 212 proteins having a MAM domain. The MAM domain is associated with various adhesive proteins and as such is likely to have adhesive function. Within MAM domains are conserved cysteine residues which play a role in the adhesion of a MAM domain to other proteins. As used herein, a MAM domain refers to an amino acid sequence of about 120 to about 170, preferably about 130 to 160, 140 to 20 , and more preferably about 145 to 147 amino acids in length.

[0579] Conserved amino acid motifs, referred to herein as “consensus patterns” or “signature patterns”, can be used to identify TANGO 212 family members having a MAM domain. For example, the following signature pattern can be used to identify TANGO 212 family members: G-x-[LIVMFY](2)-x(3)-[STA]-x(10, 11)-[LV]-x(4,6)-[LIVMF]-x(6, 7)-C-[LIVM]-x(3)-[LIVMFY]-x(3, 4)-[GSC]. The signature patterns or consensus patterns described herein are described according to the following designations: all amino acids are indicated according to their universal single letter designation; “x” designates any amino acid; x(n) designates “n” number of amino acids, e.g., x(2) designates any two amino acids, e.g., x(6, 7) designates any six to seven amino acids; and, amino acids in brackets indicates any one of the amino acids within the brackets, e.g., [STA] indicates any of one of either S (serine), T (threonine) or A (alanine). TANGO 212 has such a signature pattern at about amino acids 431 to 472.

[0580] A MAM domain further contains at least about 2 to 6, preferably, 3 to 5, more preferably 4 conserved cysteine residues. By alignment of a TANGO 212 family member with a MAM consensus sequence, conserved cysteine residues can be found. For example, as shown in FIG. 31, there is a first cysteine residue in the MAM consensus sequence that corresponds to a cysteine residue at amino acid 402 of TANGO 212; there is a second cysteine residue in the MAM consensus sequence that corresponds to a cysteine residue at amino acid 409 of TANGO 212; there is a third cysteine residue in the MAM consensus sequence that corresponds to a cysteine residue at amino acid 463 of TANGO 212; and/or there is a fourth cysteine residue in the MAM consensus sequence that corresponds to a cysteine residue at amino acid 544 of TANGO 212 (SEQ ID NO: 14). The MAM consensus sequence is available from the HMMer version 2.0 software as Accession Number PF00629. Software for HMM-based profiles is available from http://www.csc.ucsc.edu/research/compbio/sam.html and from http://genome.wustl.edu/eddy/hmmer.html.

[0581] Also included within the scope of the present invention are TANGO 212 proteins having a signal sequence.

[0582] In certain embodiments, a TANGO 212 family member has the amino acid sequence of SEQ ID NO: 14, and the signal sequence is located at amino acids 1 to 16, 1 to 17, 1 to 18, 1 to 19, or 1 to 20. In such embodiments of the invention, the domains and the mature protein resulting from cleavage of such signal peptides are also included herein. For example, the cleavage of a signal sequence consisting of amino acids 1 to 18 results in a mature TANGO 212 protein corresponding to amino acids 19 to 553 of SEQ ID NO: 14. The signal sequence is normally cleaved during processing of the mature protein.

[0583] In one embodiment, a TANGO 212 protein of the invention includes at least one EGF domain, preferably two, three, four, or five EGF domains and a MAM domain. In another embodiment, a TANGO 212 protein of the invention includes at least one EGF domain, preferably two, three, four, or five EGF domains, a MAM domain, a signal sequence, and is secreted.

[0584] Human TANGO 212

[0585] A cDNA encoding human TANGO 212 was identified by screening a human fetal lung library. A clone, comprising TANGO 212, was selected for complete sequencing based on its ability to direct the secretion of a protein of approximately 30 kDa in 35S labeled supernatants of 293T cells.

[0586] TANGO 212 includes a 2435 nucleotide cDNA (FIGS. 15A-15E; SEQ ID NO: 13). It is noted that the nucleotide sequence contains Sal I and Not I adapter sequences on the 5′ and 3′ ends, respectively. The open reading frame of this cDNA (nucleotides 269 to 1927 of SEQ ID NO: 13) encodes a 553 amino acid secreted protein (SEQ ID NO: 14).

[0587] The signal peptide prediction program SIGNALP (Nielsen et al. (1997) Protein Engineering 10:1-6) predicted that human TANGO 212 includes an 18 amino acid signal peptide (amino acids 1 to about amino acid 18 of SEQ ID NO: 14) preceding the mature TANGO 212 protein (corresponding to about amino acid 19 to amino acid 553 of SEQ ID NO: 14). Human TANGO 212 is predicted to have a molecular weight of approximately 61 kDa prior to cleavage of its signal peptide and a molecular weight of approximately 59 kDa subsequent to cleavage of its signal peptide. In addition, gel analysis of 35S labeled supernatants of 293T cells transfected with TANGO 212 expression plasmid identified a band at approximately 30 kDa. Thus, further processing of human TANGO 212 is likely to occur.

[0588] Secretion of TANGO 212 was detected by transfection using SPOT analysis (SignalP Optimized Tool, or “SPOT”). Briefly, SPOT based analysis was performed using software (termed developed to identify signal peptide encoding RNAs, all forward orientation open reading frames in the DNA sequences and phrap (see http://bozeman.mbt.washington.edu/phrap.docs/phrap.html) pre-assembled DNA sequences from the library, starting with ATG and continuing for at least 19 non-stop codons, were translated. Signal peptides in the translated sequences were then predicted using the computer algorithm SignalP (Nielsen, H. et al.(1997) Protein Engineering 10:1-6), and those sequences scoring YES were saved. Open reading frames containing signal peptides with fewer than 20 amino acids after the predicted cleavage site were discarded. The translated sequences scoring YES in the SignalP analysis were then compared against a non-redundant protein database using BLAST 1.4, PAM10 matrix with score cut-offs (parameters S and S2) set to 150. Translated sequences with a match under these conditions were discarded.

[0589] Human TANGO 212 includes five EGF domains from about amino acids 61 to 91, amino acids 98 to 132, amino acids 138 to 172, amino acids 178 to 217, and amino acids 223 to 258. Human TANGO 212 further includes a MAM domain (about amino acids 400 to 546).

[0590] A clone, EpDH202, which encodes human TANGO 212 was deposited with the American Type Culture Collection (ATCC®, 10801 University Boulevard, Manassas, Va. 20110-2209) on Sep. 10, 1998 and assigned Accession Number 202171. This deposit will be maintained under the terms of the Budapest Treaty on the International Recognition of the Deposit of Microorganisms for the Purposes of Patent Procedure. This deposit was made merely as a convenience to those of skill in the art and is not an admission that a deposit is required under 35 U.S.C. §112.

[0591] FIG. 22 depicts a hydropathy plot of human TANGO 212. As shown in the hydropathy plot, the hydrophobic region at the beginning of the plot which corresponds to about amino acids 1 to 18 is the signal sequence of TANGO 212, cleavage of which yields the mature protein of amino acids 19 to 553.

[0592] Northern analysis of human TANGO 212 mRNA expression revealed that is expressed at a very high level in placenta, strong levels in fetal lung and kidney, and at a low level in adult lung. No expression was seen in adult heart, liver, brain, skeletal muscle, kidney, pancreas, spleen, thymus, prostate, testis, ovary, small intestine, colon, peripheral blood leukocytes, or fetal brain and liver.

[0593] Mouse TANGO 212

[0594] A mouse homolog of human TANGO 212 was identified. A cDNA encoding mouse TANGO 212 was identified by analyzing the sequences of clones present in a mouse osteoblast LPS stimulated cDNA library. This analysis led to the identification of a clone, jtmoa103g01, encoding mouse TANGO 212. The mouse TANGO 212 cDNA of this clone is 1180 nucleotides long (FIGS. 35A-35C; SEQ ID NO: 25). The open reading frame of this cDNA (nucleotides 180 to 1179 of SEQ ID NO: 25) encodes a polypeptide comprising a 334 amino acid secreted protein (SEQ ID NO: 26).

[0595] In situ tissue screening was performed on mouse adult and embryonic tissue to analyze for the expression of mouse TANGO 212 mRNA. Of the adult tissues tested, only the renal medulla (kidney and medullary collecting tubules) was positive. Expression was observed primarily in the embryo. Signal was observed at E13.5 in the lung, skin (especially the upper lip), diaphragm, and muscle of the abdominal cavity and skin. This pattern remained through E18.5 with increasing lung expression. Muscle expression was still apparent at E18.5 but decreased to near background levels by postnatal day 1.5 with residual expression in the upper lip. No signal was detected in the following tissues: lung, diaphragm (smooth muscle), heart, liver, pancreas, thymus, eye, brain, bladder, small intestine, skeletal muscle, colon, placenta. In the case of embryonic mouse expression during the period of E13.5 through E16.5, expression was observed in the skin; especially upper lip/snout area, in the lung-multifocal at 13.5 but became more ubiquitous and more intense, muscle and diaphragm, skin, limbs (especially 13.5 and 14.5), and the abdominal wall. At E18.5, the expression observed was the same as for 13.5 through 16.5 but decreasing in muscle and skin (except upper lip). At P1.5, the expression signal decreased to almost background levels except in the upper lip.

[0596] Human and mouse TANGO 212 sequences exhibit considerable similarity at the protein, nucleic acid, and open reading frame levels. An alignment (made using the ALIGN 35 software {Myers and Miller (1989) CABIOS, ver. 2.0}; BLOSUM 62 scoring matrix; gap penalties −12/−4), reveals a protein identity of 77.2%. The human and mouse TANGO 212 cDNAs (SEQ ID NOs: 13 and 25) are 80.5% identical, as assessed using the same software and parameters as indicated (without the BLOSUM 62 scoring matrix). In the respective open reading frames, calculated in the same fashion as the cDNAs, human and mouse TANGO 212 are 83.3% identical.

[0597] Use of TANGO 212 Nucleic Acids Polypeptides, and Modulators Thereof

[0598] The TANGO 212 proteins of the invention comprise a family of proteins having the hallmarks of a secreted protein of the EGF family. Accordingly, TANGO 212 proteins likely function in a similar manner as members of the EGF family. Thus, TANGO 212 modulators can be used to treat EGF-associated disorders.

[0599] For example, the TANGO 212 proteins likely play a role in tissue regeneration and/or wound healing. In vitro studies with several members of the EGF family such as EGF and TGF-a have shown that these proteins influence a number of cellular processes involved in soft tissue repair leading to their categorization as wound hormones in wound healing. The affects of these proteins include cellular proliferation and chemotaxis. Thus, the TANGO 212 proteins of the invention likely affect various cells associated with wound healing. Effects that the TANGO 212 proteins have on various cells include proliferation and chemotaxis. Accordingly, the TANGO 212 proteins, nucleic acids and/or modulators of the invention are useful in the treatment of wounds and/or the modulation of proliferative disorders, e.g., cancer.

[0600] Because TANGO 212 is expressed in the kidney, the TANGO 212 polypeptides, nucleic acids and/or modulators thereof can be used to modulate the function, morphology, proliferation and/or differentiation of cells in the tissues in which it is expressed. Such molecules can also be used to treat disorders associated with abnormal or aberrant metabolism or function of cells in the tissues in which it is expressed. Such can be used to treat or modulate renal (kidney) disorders as discussed above in the section relating to uses of TANGO 140.

[0601] TANGO 213

[0602] In another aspect, the present invention is based on the discovery of cDNA molecules which encode a novel family of proteins having sequence similarity to progesterone binding protein, referred to herein as TANGO 213 proteins.

[0603] Also included within the scope of the present invention are TANGO 213 proteins having a signal sequence.

[0604] In certain embodiments, a TANGO 213 family member has the amino acid sequence of SEQ ID NO: 16, and the signal sequence is located at amino acids 1 to 20, 1 to 22, 1 to 22, or 1 to 23. In such embodiments of the invention, the domains and the mature protein resulting from cleavage of such signal peptides are also included herein. For example, the cleavage of a signal sequence consisting of amino acids 1 to 22 results in a mature TANGO 213 protein corresponding to amino acids 23 to 371. The signal sequence is normally cleaved during processing of the mature protein.

[0605] In particular, BLASTP analysis using the amino acid sequence of TANGO 213 revealed sequence similarity between TANGO 213 and several steroid binding-proteins including 51% sequence identity between TANGO 213 and human progesterone binding protein (GenBank Accession No. Y12711). Thus, the TANGO 213 proteins of the invention are likely to function similarly to steroid binding-proteins. Steroid binding protein activities include the ability to form protein-protein interactions with steroid hormones in signaling pathways and/or the ability to modulate intracellular ion levels, e.g., sodium and/or calcium levels. Accordingly, TANGO 213 proteins, nucleic acids and/or modulators can be used to treat steroid binding protein-associated disorders.

[0606] Human TANGO 213

[0607] A cDNA encoding human TANGO 213 was isolated by screening a human mesangial cell library. Human TANGO 213 comprises a 1496 nucleotide cDNA (16A-16C; SEQ ID NO: 15). It is noted that this nucleotide sequence contains Sal I and Not I adapter sequences on the 5′ and 3′ ends, respectively. The open reading frame of this cDNA (nucleotides 58 to 870 of SEQ ID NO: 15) encodes a 271 amino acid secreted protein (SEQ ID NO: 16).

[0608] The signal peptide prediction program SIGNALP (Nielsen et al. (1997) Protein Engineering 10:1-6) predicted that human TANGO 213 includes a 22 amino acid signal peptide (amino acids 1 to about amino acid 22 of SEQ ID NO: 16) preceding the mature TANGO 213 protein (corresponding to about amino acid 23 to amino acid 271 of SEQ ID NO: 16). Human TANGO 213 is predicted to have a molecular weight of approximately 29.5 kDa prior to cleavage of its signal peptide and a molecular weight of approximately 27.5 kDa subsequent to cleavage of its signal peptide.

[0609] A clone, EpDH156, which encodes human TANGO 213 was deposited with the American Type Culture Collection (ATCC®, 10801 University Boulevard, Manassas, Va. 20110-2209) on Oct. 30, 1998 and assigned Accession Number 98965. This deposit will be maintained under the terms of the Budapest Treaty on the International Recognition of the Deposit of Microorganisms for the Purposes of Patent Procedure. This deposit was made merely as a convenience to those of skill in the art and is not an admission that a deposit is required under 35 U.S.C. §112.

[0610] FIG. 23 depicts a hydropathy plot of human TANGO 213. As shown in the hydropathy plot, the hydrophobic region at the beginning of the plot which corresponds to about amino acids 1 to 22 is the signal sequence of TANGO 213.

[0611] Northern analysis of human TANGO 213 mRNA expression revealed expression at a very high level in testis and kidney. Expression at lower levels was also seen in all other tissues including adult heart, liver, brain, skeletal muscle, kidney, pancreas, spleen, thymus, prostate, ovary, small intestine, colon, and peripheral blood leukocytes. Low levels of expression were observed in lung.

[0612] The human gene for TANGO 213 was mapped on radiation hybrid panels to the long arm of chromosome 17, in the region p13.3. Flanking markers for this region are WI-5436 and WI-6584. The MDCR (Miller-Dieker syndrome), PEDF (pigment epithelium derived factor), and PFN1 (profilin 1) genes also map to this region of the human chromosome. This region is syntenic to mouse chromosome 11, locus 46(g). The ti (tipsy) loci also maps to this region of the mouse chromosome. The pfn1 (profilin 1), htt (5-hydroxytryptamine (serotonin) transporter), acrb (acetylcholine receptor beta) genes also map to this region of the mouse chromosome.

[0613] MOUSE and RAT TANGO 213

[0614] A mouse homolog of human TANGO 213 was identified. A cDNA encoding mouse TANGO 213 was identified by analyzing the sequences of clones present in a mouse testis cDNA library. This analysis led to the identification of a clone, jtmz213a01, encoding mouse TANGO 213. The mouse TANGO 213 cDNA of this clone is 2154 nucleotides long (FIGS. 36A-36C; SEQ ID NO: 27). It is noted that the nucleotide sequence contains a Not I adapter sequence on the 3′ end. The open reading frame of this cDNA (nucleotides 41 to 616 of SEQ ID NO: 27) encodes a protein comprising the 192 amino acid sequence protein (SEQ ID NO: 28).

[0615] A rat homolog of human TANGO 213 was identified. A cDNA encoding rat TANGO 213 was identified by analyzing the sequences of clones present in a rat testis cDNA library. This analysis led to the identification of a clone encoding rat TANGO 213. The rat TANGO 213 cDNA of this clone is 455 nucleotides long (FIG. 38; SEQ ID NO: 29). A translation of one open reading frame from the rat cDNA is shown in SEQ ID NO: 30.

[0616] In situ tissue screening was performed on mouse adult and embryonic tissue to analyze for the expression of mouse TANGO 213 mRNA. The strongest expression was observed in the seminiferous tubules of the testes. Moderate or weak expression is observed in several other adult tissues including the liver, kidney, and placenta. A weak, ubiquitous signal was observed in brain, heart, liver, kidney, adrenal gland, and the spleen. A signal was observed in the ovaries. A ubiquitous signal was seen in the labyrinth zone and slightly higher signal in the zone of giant cells. No signal was detected in the following tissues: spinal cord, eye and harderian gland, submandibular gland, white fat, brown fat, stomach, lung, colon, small intestine, thymus, lymph node, pancreas, skeletal muscle, and bladder. Embryonic expression is negligible. A weak signal was observed in the developing liver and CNS. The signal in the CNS was near background levels. Specifically, at E13.5, a weak, ubiquitous signal observed in the liver. At E14.5 and E15.5, a weak, ubiquitous signal was observed in the liver, brain, and spinal cord. At E16.5, E18.5 and P1.5, the signal in liver and CNS was even less pronounced and was almost at background levels. Library array expression studies were carried out as described above for mouse TANGO 197. Strong expression was detected in the choroid plexus 12.5 day whole mouse embryo, TM4 (Sertoli cells), from testis, esophagus, and kidney fibrosis library. Weak expression was detected in LPS-stimulated osteoblast tissue, 10.5 day whole mouse embryo, and in 11.5 day whole mouse embryo. No expression was detected in differential 3T3, 10.5 day mouse fetus, mouse kidney fibrosis model nephrotoxic serum (NTS), LPS-stimulated heart, LPS-stimulated osteoblasts, lung, mouse insulinoma (Nit-1), mouse normal/hyperplastic islets (pancreas), normal spleen, 11.5 day mouse, LPS-stimulated lung, Lung, LPS-stimulated osteoblasts, BL6 Lung, day 15, 3 hour inflammation model, BDL Day 10 (balb C liver), hypertropic heart, LPS-stimulated lung, LPS-stimulated kidney, LPS-stimulated lymph node, Balb C liver (bile duct ligation d2), mc/9 mast cells, 13.5 day mouse, LPS-stimulated anchored heart, normal thymus, Th2-ovarian-Tg, Balb C liver (bile duct ligation d2), mc/9 mast cells, normal heart, brain polysome (MPB), LPS-stimulated anchored liver, brain (EAE d10 model), th1-ovarian-Tg, heart, hypothalamus, lone term bone, marrow cells, LPS-stimulated lung, megakaryocyte, LPS-stimulated spleen, hyphae-stimulated long term bone marrow, lung, angiogenic pancreatic islets, Th2, brain, LPS-stimulated thymus, LPS-stimulated microglial cells, testes, tumor pancreatic islets, LPS-stimulated brain, LPS-stimulated alveolar macrophage cell line, mouse lung bleomycin model d7, pregnant uterus, and hypothalamus nuclei.

[0617] Human and mouse TANGO 213 sequences exhibit considerable similarity at the protein, nucleic acid, and open reading frame levels. An alignment (made using the ALIGN software {Myers and Miller (1989) CABIOS, ver. 2.0}; BLOSUM 62 scoring matrix; gap penalties −12/−4), reveals a protein identity of 64.6%. The human and mouse TANGO 213 cDNAs are 68.8% identical (SEQ ID NOs: 15 and 27), as assessed using the same software and parameters as indicated (without the BLOSUM 62 scoring matrix). In the respective ORFs, calculated in the same fashion as the cDNAs, human and mouse TANGO 213 are 77.1% identical.

[0618] Uses of TANGO 213 Nucleic Acids Polypeptides and Modulators Thereof

[0619] The TANGO 213 proteins and nucleic acid molecules of the invention have at least one “TANGO 213 activity” (also referred to herein as “TANGO 213 biological activity”). TANGO 213 activity refers to an activity exerted by a TANGO 213 protein or nucleic acid molecule on a TANGO 213 responsive cell in vivo or in vitro. Such TANGO 213 activities include at least one or more of the following activities: 1) interaction of a TANGO 213 protein with a TANGO 213-target molecule; 2) activation of a TANGO 213 target molecule; 3) modulation of cellular proliferation; 4) modulation of cellular differentiation; or 5) modulation of a signaling pathway. Thus, the TANGO 213 proteins, nucleic acids and/or modulators can be used for the treatment of a disorder characterized by aberrant TANGO 213 expression and/or an aberrant TANGO 213 activity, such as proliferative and/or differentiative disorders.

[0620] As TANGO 213 is expressed in the kidney, the TANGO 213 polypeptides, nucleic acids and/or modulators thereof can be used to modulate the function, morphology, proliferation and/or differentiation of cells in the tissues in which it is expressed. Such molecules can also be used to treat disorders associated with abnormal or aberrant metabolism or function of cells in the tissues in which it is expressed. Such can be used to treat or modulate renal (kidney) disorders as discussed above in the section relating to uses of TANGO 140.

[0621] Furthermore, as TANGO 213 is expressed in the testis, the TANGO 213 polypeptides, nucleic acids and/or modulators thereof can be used as discussed above in the section relating to uses of TANGO 128.

[0622] TANGO 224

[0623] In another aspect, the present invention is based on the discovery of cDNA molecules which encode a novel family of proteins referred to herein as TANGO 224 proteins.

[0624] For example, the TANGO 224 proteins of the invention include a thrombospondin type I (TSP-I) domain. The TSP-I domain is involved in the binding to both soluble and matrix macromolecules (e.g., sulfated glycoconjugates). As used herein, a thrombospondin type I (TSP-I) domain refers to an amino acid sequence of about 30 to about 60, preferably about 35 to 55, 40 to 50, and more preferably about 45 amino acids in length. TANGO 224 has such a signature pattern at about amino acids 42 to 81.

[0625] Conserved amino acid motifs, referred to herein as “consensus patterns” or “signature patterns”, can be used to identify TANGO 224 family members having a TSP-I domain. For example, the following signature pattern can be used to identify TANGO 224 family members: W-S-x-C-[SD]-x(2)-C-x(2)-G-x(3, 5)-R-x(7, 15)-C-x(9, 11)-C-x(4, 5)-C. A TSP-I domain of TANGO 224 extends, for example, from about amino acids 37 to 81 (SEQ ID NO: 18).

[0626] A TSP-I domain further contains at least about 4 to 9, preferably, 5 to 8, more preferably 6 conserved cysteine residues. By alignment of a TANGO 224 family member with a TSP-I consensus sequence, conserved cysteine residues can be found. For example, as shown in FIG. 32, there is a first cysteine residue in the TSP-I consensus sequence that corresponds to a cysteine residue at amino acid 45 of TANGO 224; there is a second cysteine residue in the TSP-I consensus sequence that corresponds to a cysteine residue at amino acid 49 of TANGO 224; there is a third cysteine residue in the TSP-I consensus sequence that corresponds to a cysteine residue at amino acid 60 of TANGO 224; there is a fourth cysteine residue in the TSP-I consensus sequence that corresponds to a cysteine residue at amino acid 66 of TANGO 224; there is a fifth cysteine residue in the TSP-I consensus sequence that corresponds to a cysteine residue at amino acid 76 of TANGO 224; and/or there is a sixth cysteine residue in the TSP-I consensus sequence that corresponds to a cysteine residue at amino acid 81 of TANGO 224. The TSP-I consensus sequence is available from the HMMer version 2.0 software as Accession Number PF00090. Software for HMM-based profiles is available from http://www.csc.ucsc.edu/research/compbio/sam.html and from http://genome.wustl.edu/eddy/hmmer.html.

[0627] For example, the TANGO 224 proteins of the invention include a Furin-like cysteine rich domain (Accession number:PF00757). The consensus sequence for the Furin-like cysteine rich domain is: C-Xaa(3)-C-Xaa-G-G-Xaa(n)-C-Xaa(5)-D-G, wherein C is cysteine, Xaa is any amino acid, G is glycine, n is about 5 to 15, preferably 6 to 14, more preferably about 7 to 12, and D is aspartic acid. As used herein, a Furin-like cysteine rich domain refers to an amino acid sequence of about 80 to 160, preferably of about 100 to 150, and more preferably about 110 to 130, amino acids in length. Human TANGO 224, form 2 has such a signature pattern at about amino acids 707-829 (SEQ ID NO: 20). Also included within the scope of the present invention are TANGO 224 proteins having a signal sequence.

[0628] In certain embodiments, a TANGO 224 family member has the amino acid sequence of SEQ ID NO: 18, and the signal sequence is located at amino acids 1 to 26, 1 to 27, 1 to 28, 1 to 29 or 1 to 30. In such embodiments of the invention, the domains and the mature protein resulting from cleavage of such signal peptides are also included herein. For example, the cleavage of a signal sequence consisting of amino acids 1 to 28 results in a mature TANGO 224, form 1 protein corresponding to amino acids 29 to 458 of SEQ ID NO: 18. The signal sequence is normally cleaved during processing of the mature protein.

[0629] A cDNA encoding human TANGO 224 was identified by screening a human fetal spleen library. A clone comprising human TANGO 224 was selected for complete sequencing. In one embodiment, TANGO 224 is referred to as TANGO 224, form 1. Human TANGO 224, form 1 comprises a 2689 nucleotide cDNA (FIGS. 17A-17D; SEQ ID NO: 17). The open reading frame of this TANGO 224, form 1 cDNA clone (nucleotides 1 to 1440 of SEQ ID NO: 17) and encodes a secreted protein comprising the 480 amino acid sequence (SEQ ID NO: 18).

[0630] Another cDNA clone comprising human TANGO 224, was also obtained. This TANGO 224 clone comprises a 2691 nucleotide cDNA (FIGS. 37A-37F; SEQ ID NO: 19), and encodes a human TANGO 224 and is referred to as human TANGO 224, form 2. The open reading frame of human TANGO 224, form 2 cDNA clone (nucleotides 67 to 2690 of SEQ ID NO: 19) and encodes a secreted protein comprising the 874 amino acid protein (SEQ ID NO: 20).

[0631] The signal peptide prediction program SIGNALP (Nielsen et al. (1997) Protein Engineering 10:1-6) predicted that human TANGO 224 form 1 includes an 28 amino acid signal peptide (amino acids 1 to about amino acid 28 of SEQ ID NO: 18) preceding the mature TANGO 224 protein (corresponding to about amino acid 29 to amino acid 458 of SEQ ID NO: 18). Human TANGO 224 is predicted to have a molecular weight of approximately 50 kDa prior to cleavage of its signal peptide and a molecular weight of approximately 47 kDa subsequent to cleavage of its signal peptide.

[0632] The signal peptide prediction program SIGNALP (Nielsen et al. (1997) Protein Engineering 10: 1-6) predicted that human TANGO 224 form 2 includes an 28 amino acid signal peptide (amino acids 1 to about amino acid 28 of SEQ ID NO: 20) preceding the mature TANGO 224, form 2 protein (corresponding to about amino acid 29 to amino acid 874 of SEQ ID NO: 20). Human TANGO 224 is predicted to have a molecular weight of approximately 131 kDa prior to cleavage of its signal peptide and a molecular weight of approximately 127 kDa subsequent to cleavage of its signal peptide. Human TANGO 224, form 1 has a TSP-I domain from about amino acids 37 to 81 of SEQ ID NO: 18. Human TANGO 224, form 2 has a TSP-I domain from about amino acids 37 to 81 of SEQ ID NO: 20.

[0633] Human TANGO 224, form 2 has a Furin-like cysteine rich domain from amino acids 707 to 829 of SEQ ID NO: 20.

[0634] A clone, EpDH210, which encodes human TANGO 224, form 1 was deposited with the American Type Culture Collection (ATCC®, 10801 University Boulevard, Manassas, Va. 20110-2209) on Oct. 30, 1998 and was assigned Accession Number 98966. This deposit will be maintained under the terms of the Budapest Treaty on the International Recognition of the Deposit of Microorganisms for the Purposes of Patent Procedure. This deposit was made merely as a convenience to those of skill in the art and is not an admission that a deposit is required under 35 U.S.C. §112.

[0635] FIG. 24 depicts a hydropathy plot of human TANGO 224. As shown in the hydropathy plot, the hydrophobic region at the beginning of the plot which corresponds to about amino acids 1 to 28 is the signal sequence of TANGO 224.

[0636] Northern analysis of human TANGO 224 mRNA expression using TANGO 224 form 2 nucleotide sequence as a probe revealed expression of TANGO 224 mRNA in the spleen, prostate, ovary and colon. Only weak expression was detected in testis, small intestine, and peripheral blood leukocytes. No expression was detected in the thymus.

[0637] Library Array Expression studies were performed as described above for the mouse TANGO 128 gene, except that human tissues were tested. Strong expression was obtained in the pituitary and fetal spleen. Only weak expression was detected in the primary osteoblasts, umbilical smooth muscle treated and the bronchial smooth muscle. No expression was detected in kidney, testes, Prostate, HMC-1 control (mast cell line), fetal dorsal spinal cord, human colon to liver metastasis, erythroblasts from CD34+ Blood, human spinal cord (ION 3), HUVEC TGF-B (h. umbilical endothelia), HUVEC (h. umbilical endothelia), human spinal cord (ION 3), brain K563 (red blood cell line), uterus, Hep-G2 (human insulinoma), human normal colon, human colon to liver metastasis, skin, HUVEC controls (umbilical endothelial cells), human colon (inflammatory bowel disease), melanoma (G361 cell line), adult bone arrow CD34+ cells, HPK, human lung, mammary gland, normal breast epithelium, colon to liver metastasis (CHT128), normal breast, bone marrow (CD34+), W138 (H. embryonic Lung), Th1 cells, HUVEC untreated (umbilical endothelium), liver, spleen, normal human ovarian epithelia, colon to liver metastasis (CHT133), PTH-treated osteoblasts, ovarian ascites, lung squamous cell, carcinoma (MDA 261), Th2 cells, colon (WUM 23), thymus, heart, small intestine, normal megakaryoctyes, colon carcinoma (NDR109), lung adenocarcinoma (PIT245), IBD Colon (WUM6), brain-subcortical white matter (ION2), prostate tumor xenograft A12, trigeminal ganglia 9 week fetus, thymus, retinal pigmentosa epithelia, bone marrow, colon carcinoma (NDR103), lung squamous cell carcinoma (PIT299), cervical cancer, normal prostate, Prostate tumor xenograft K10, Lumbrosacaral spinal cord, A549 control, stomach, retina, Th-1 induced T cell, colon carcinoma (NDR82), d8 dendritic ells, spinal cord, ovarian epithelial tumor, prostate cancer to liver metastasis JHH3, lumbrosacaral dorsal root ganglia, salivary gland, skeletal muscle, HMC-1 (human mast cell line), Th-2 induced T-cell, colon carcinoma (NDR097), H6. megakaryocytes, H7. dorsal root ganglia (ION 6, 7, 8), H8. HUVEC L-NAME (umbilical endothelia), H9. prostate cancer to liver metastasis JHH4, H 10. Dorsal root ganglia (ION 6, 7, 8),

[0638] Use of TANGO 224 Nucleic Acids, Polypeptides, and Modulators Thereof

[0639] As discussed above, the TSP-I domain of TANGO 224 is involved in matrix interactions. Thus, the TANGO 224 proteins of the invention likely play a role in various matrix interactions, e.g., matrix binding. Thus, a TANGO 224 activity is at least one or more of the following activities: 1) regulation of extracellular matrix structuring; 2) modulation of cellular adhesion, either in vitro or in vivo; 3) regulation of cell trafficking and/or migration. Accordingly, the TANGO 224 proteins, nucleic acid molecules and/or modulators can be used to modulate cellular interactions such as cell-cell and/or cell-matrix interactions and thus, to treat disorders associated with abnormal cellular interactions.

[0640] As TANGO 224 was originally found in a fetal spleen library, TANGO 228 nucleic acids, proteins, and modulators thereof can be used to modulate the proliferation, differentiation, and/or function of cells that form the spleen, e.g., cells of the splenic connective tissue, e.g., splenic smooth muscle cells and/or endothelial cells of the splenic blood vessels. TANGO 224 nucleic acids, proteins, and modulators thereof can also be used to modulate the proliferation, differentiation, and/or function of cells that are processed, e.g., regenerated or phagocytized within the spleen, e.g., erythrocytes and/or B and T lymphocytes and macrophages. Thus, TANGO 224 nucleic acids, proteins, and modulators thereof can be used to treat spleen, e.g., the fetal spleen, associated diseases and disorders. Examples of splenic diseases and disorders include e.g., splenic lymphoma and/or splenomegaly, and/or phagocytotic disorders, e.g., those inhibiting macrophage engulfinent of bacteria and viruses in the bloodstream.

[0641] HtrA-2 (TANGO 214)

[0642] The HtrA-2 proteins and nucleic acid molecules comprise a family of molecules having certain conserved structural and functional features. For example, HtrA-2 proteins of the invention have signal sequences. Thus, in one embodiment, an HtrA-2 protein contains a signal sequence of about amino acids 1 to 17. The signal sequence is normally cleaved during processing of the mature protein.

[0643] HtrA-2 family members can also include an IGF-binding domain. As used herein, the term “IGF-binding domain” refers to a cysteine rich protein domain that includes about 40-80 amino acid residues, preferably about 50-70 amino acid residues, more preferably about 55-65 amino acid residues, and most preferably about 61 amino acid residues. Typically, an IGF-binding domain is found at the N-terminal half of HtrA-2 and includes a cluster of about 6-15 cysteine residues conserved in IGF binding protein family members, more preferably about 8-10 cysteine residues, and still more preferably about 11 cysteine residues. In addition, an IGF-binding domain includes at least the following consensus sequence: C-Xaa-C-C-Xaa(n1)-C-Xaa-Xaa(n2)-C, wherein C is a cysteine residue, Xaa is any amino acid, n1 is about 1-5 amino acid residues, more preferably about 1-3 amino acid residues, and more preferably 2 amino acid residues in length, and n2 is about 2-10 amino acid residues, more preferably 5-10 amino acid residues, and more preferably 6 amino acid residues in length. In a preferred embodiment, an IGF-binding domain includes at least the following consensus sequence: C-Xaa-C-C-Xaa(n1)-C-A-Xaa(n2)-C, wherein C is a cysteine residue, Xaa is any amino acid, n1 is about 1-5 amino acid residues, more preferably about 1-3 amino acid residues, and more preferably 2 amino acid residues in length, and n2 is about 2-10 amino acid residues, more preferably 5-10 amino acid residues, and more preferably 6 amino acid residues in length.

[0644] In one embodiment, an HtrA-2 family member includes an IGF-binding domain having an amino acid sequence that is at least about 55%, preferably at least about 65%, more preferably at least about 75%, yet more preferably at least about 85%, and most preferably at least about 95% identical to amino acids 18 to 78, which is the IGF-binding domain of HtrA-2. In another embodiment, an HtrA-2 family member includes an IGF-binding domain having an amino acid sequence that is at least about 55%, preferably at least about 65%, more preferably at least about 75%, yet more preferably at least about 85%, and most preferably at least about 95% identical to amino acids 18 to 78, includes a conserved cluster of 11 cysteine residues, and an IGF-binding domain consensus sequence as described herein. In yet another embodiment, an HtrA-2 family member includes an IGF-binding domain having an amino acid sequence that is at least 55%, preferably at least about 65%, more preferably at least about 75%, yet more preferably at least about 85%, and most preferably at least about 95% identical to amino acids 18 to 78, includes a conserved cluster of 11 cysteine residues, an IGF-binding domain consensus sequence as described herein, and has at least one HtrA-2 biological activity as described herein.

[0645] In a preferred embodiment, an HtrA-2 family member has the amino acid sequence of SEQ ID NO: 32 wherein the cluster of conserved cysteine residues is located within amino acid residues 25 to 76 (at positions, 25, 29, 34, 39, 48, 50, 51, 54, 62, 70, and 76 of SEQ ID NO: 32), and the IGF-binding domain consensus sequence is located at amino acid residues 48 to 62 of SEQ ID NO: 32.

[0646] An HtrA-2 family member can also include a Kazal protease inhibitor domain. As used herein, the term “Kazal protease inhibitor domain” refers to a protein domain that includes about 30-70 amino acid residues, preferably about 40-60 amino acid residues, more preferably about 45-55 amino acid residues, and most preferably about 48 amino acid residues. Typically, a Kazal protease inhibitor domain includes a conserved tyrosine residue and a conserved cluster of about 3-7 cysteine residues, preferably about 4-6 cysteine residues, and still more preferably about 5 cysteine residues. In addition, a Kazal serine protease inhibitor domain includes at least the following consensus sequence: C-Xaa(n1)-C-Xaa(n2)-Y-Xaa(3)-C, wherein C is a cysteine residue, Xaa is any amino acid, nl is about 4-10 amino acid residues in length, more preferably about 5-8 amino acid residues, and most preferably about 6 amino acid residues in length, n2 is about 4-10 amino acid residues, more preferably about 5-8 amino acid residues, and most preferably about 6 amino acid residues in length, Y is a tyrosine residue, and 3 represents a length of 3 amino acid residues of the type preceding it (in this case 3 of any amino acid (Xaa)).

[0647] In one embodiment, an HtrA-2 family member includes a Kazal protease inhibitor domain having an amino acid sequence that is at least about 55%, preferably at least about 65%, more preferably at least about 75%, yet more preferably at least about 85%, and most preferably at least about 95% identical to amino acids 79 to 126. In another embodiment, an HtrA-2 family member includes a Kazal protease inhibitor domain having an amino acid sequence that is at least about 55%, preferably at least about 65%, more preferably at least about 75%, yet more preferably at least about 85%, and most preferably at least about 95% identical to amino acids 79 to 126, includes a cluster of 5 cysteine residues, and a Kazal protease inhibitor domain consensus sequence as described herein. In yet another embodiment, an HtrA-2 family member includes a Kazal protease inhibitor domain having an amino acid sequence that is at least about 55%, preferably at least about 65%, more preferably at least about 75%, yet more preferably at least about 85%, and most preferably at least about 95% identical to amino acids 79 to 126, includes a cluster of 5 cysteine residues, and a Kazal protease inhibitor domain consensus sequence as described herein, and has at least one HtrA-2 biological activity as described herein.

[0648] In a preferred embodiment, an HtrA-2 family member has the amino acid sequence of SEQ ID NO: 32 wherein the cluster of 5 cysteine residues is located within amino acid residues 81 to 126 (at positions 81, 83, 90, 101, and 126) and the Kazal protease inhibitor domain consensus sequence is located from amino acid residues 83 to amino acid residue 101 of SEQ ID NO: 32.

[0649] An HtrA-2 family member can also include a serine protease domain. As used herein, the term “serine protease domain” refers to a protein domain that includes about 180-240 amino acid residues, preferably about 190-230 amino acid residues, more preferably about 205-215 amino acid residues, and most preferably about 208 amino acid residues. In addition, a serine protease domain includes a conserved serine residue, a conserved histidine residue, and a conserved aspartic acid residue in its active site. The conserved histidine, aspartic acid, and serine residues typically appear in the active site within three motifs: 1) a conserved histidine active site motif as follows: Thr-Asn-Xaa-His-Val, where Xaa represents Ala or Asn; 2) a conserved aspartic acid active site motif as follows: Asp-Ile-Ala-Xaa-Ile, where Xaa represents Leu or Thr; and 3) a conserved serine active site motif as follows: Gly-Asn-Ser-Gly-Gly-Xaa-Leu, where Xaa represents Pro or Ala. The conserved histidine active site motif is typically N-terminal to the conserved aspartic acid active site motif, which is N-terminal to the conserved serine active site motif. The histidine and aspartic acid motifs are typically separated from (noninclusive of the last amino acid residue of the first motif and the first residue of the subsequent motif) one another by at least about 15 to 55 amino acid residues, more preferably about 25 to 45 amino acid residues, still more preferably about 30 to 40 amino acid residues, and most preferably about 34 amino acid residues. The aspartic acid and serine motifs are typically separated from (noninclusive of the last amino acid residue of the first motif and the first residue of the subsequent motif) one another by at least about 50 to 90 amino acid residues, more preferably 60 to 80 amino acid residues, still more preferably about 65 to 78 amino acid residues, and most preferably about 71 amino acid residues.

[0650] In one embodiment, an HtrA-2 family member includes a serine protease domain having an amino acid sequence that is at least about 55%, preferably at least about 65%, more preferably at least about 75%, yet more preferably at least about 85%, and most preferably at least about 95% identical to amino acids 140 to 347, which is the serine protease domain of HtrA-2. In another embodiment, an HtrA-2 family member includes a serine protease domain having an amino acid sequence that is at least about 55%, preferably at least about 65%, more preferably at least about 75%, yet more preferably at least about 85%, and most preferably at least about 95% identical to amino acids 140 to 347 and includes a conserved histidine active site motif, a conserved aspartic acid active site motif, and a conserved serine active site motif as described herein. In yet another embodiment, an HtrA-2 family member includes a serine protease domain having an amino acid sequence that is at least about 55%, preferably at least about 65%, more preferably at least about 75%, yet more preferably at least about 85%, and most preferably at least about 95% identical to amino acids 140 to 347, includes a conserved histidine active site motif, a conserved aspartic acid active site motif, and a conserved serine active site motif as described herein, and has at least one HtrA-2 biological activity as described herein.

[0651] In a preferred embodiment, an HtrA-2 family member has the amino acid sequence of SEQ ID NO: 32 wherein the conserved histidine active site motif is located at amino acid residues 188 to 192 (the histidine residue is at position 191), the conserved aspartic acid active site motif is located at amino acid residues 227 to 231 (the aspartic acid residue is at position 227), and the conserved serine active site motif is located at amino acid residues 303 to 309 (the serine residue is at position 305) of SEQ ID NO: 32.

[0652] In one embodiment, an HtrA-2 family member can also include a PDZ domain. As used herein, the term “PDZ domain” refers to a protein domain that includes about 70-110 amino acid residues, preferably about 80-100 amino acid residues, more preferably about 87-97 amino acid residues, and most preferably about 92 amino acid residues. Typically, a PDZ domain is located at the C-terminal half of the HtrA-2 protein and includes at least about 3-7 conserved glycine residues, more preferably about 4-6 conserved glycine residues, and most preferably about 5 conserved glycine residues. Typically, a PDZ domain also includes at least the following consensus sequence of G-G-Xaa(n)-D-Xaa(n)-N-G, wherein G is glycine, Xaa is any amino acid, n is about 4-10 amino acid residues in length, more preferably about 5-8 amino acid residues in length, and more preferably about 5-6 amino acid residues in length, and D is aspartic acid.

[0653] In one embodiment, an HtrA-2 family member includes a PDZ domain having an amino acid sequence that is at least about 55%, preferably at least about 65%, more preferably at least about 75%, yet more preferably at least about 85%, and most preferably at least about 95% identical to amino acids 348 to 439. In another embodiment, an HtrA-2 family member includes PDZ domain having an amino acid sequence that is at least about 55%, preferably at least about 65%, more preferably at least about 75%, yet more preferably at least about 85%, and most preferably at least about 95% identical to amino acids 348 to 439 and is located at the C-terminal half of the protein and has a PDZ domain consensus sequence as described herein. In another embodiment, an HtrA-2 family member includes a PDZ domain having an amino acid sequence that is at least about 55%, preferably at least about 65%, more preferably at least about 75%, yet more preferably at least about 85%, and most preferably at least about 95% identical to amino acids 348 to 439, is located at the C-terminal half of the protein, includes about 5 conserved glycine residues, and has a PDZ domain consensus sequence as described herein. In yet another embodiment, an HtrA-2 family member includes a PDZ domain having an amino acid sequence that is at least about 55%, preferably at least about 65%, more preferably at least about 75%, yet more preferably at least about 85%, and most preferably at least about 95% identical to amino acids 348 to 439 of SEQ ID NO: 32, is located at the C-terminal half of the protein, includes about 5 conserved glycine residues, has a PDZ domain consensus sequence as described herein, and has at least one HtrA-2 biological activity as described herein.

[0654] In a preferred embodiment, an HtrA-2 family member has the amino acid sequence of SEQ ID NO: 32 wherein the PDZ domain is located at the C-terminal half of the protein, from amino acid residues 348 to 439, the PDZ domain consensus sequence is located from amino acid residues 400 to amino acid residue 413, and the conserved glycine residues are located within amino acid residues 358-413 (at positions 358, 385, 400, 401, and 413 of SEQ ID NO: 32).

[0655] In another embodiment, the signal sequence and the IGF-binding domain of the HtrA-2 family member are adjacent (i.e., there are no intervening residues between the last residue of the signal sequence and the first residue of the IGF-binding domain) to one another. In another example, the IGF-binding domain and Kazal protease inhibitor domain are adjacent (i.e., there are no intervening residues between the last residue of the IGF-binding domain and the first residue of the Kazal protease inhibitor domain) to one another, and the IGF-binding domain is N-terminal to the Kazal protease inhibitor domain. In still another example, the signal sequence is adjacent and N-terminal to the IGF-binding domain, and the Kazal protease inhibitor domain is adjacent to and C-terminal to the IGF-binding domain.

[0656] HUMAN HtrA-2 (TANGO 214)

[0657] A cDNA encoding human HtrA-2 (TANGO 214) was identified by analyzing the sequences of clones present in an LPS-stimulated osteoblast cDNA library and a prostate stroma cDNA library. This analysis led to the identification of a clone, jthqc058b12, encoding full-length human HtrA-2. The human HtrA-2 cDNA of this clone is 2577 nucleotides long (FIGS. 39A-39D; SEQ ID NO: 31). The open reading frame of this cDNA (nucleotides 222 to 1580 of SEQ ID NO: 31) encodes a 453 amino acid secreted protein (SEQ ID NO: 32).

[0658] In one embodiment of a nucleotide sequence of human HtrA-2, the nucleotide at position 278 is an guanine (G). In this embodiment, the amino acid at position 19 is glutamate (E). In another embodiment of a nucleotide sequence of human HtrA-2, the nucleotide at position 278 is a cytosine (C). In this embodiment, the amino acid at position 19 is aspartate (D). In another embodiment of a nucleotide sequence of human HtrA-2, the nucleotide at position 395 is guanine (G). In this embodiment, the amino acid at position 58 is glutamate (E). In another embodiment of a nucleotide sequence of human HtrA-2, the nucleotide at position 395 is cytosine (C). In this embodiment, the amino acid at position 58 is aspartate (D). In another embodiment of a nucleotide sequence of human HtrA-2, the nucleotide at position 401 is guanine (G). In this embodiment, the amino acid at position 60 is glutamate (E). In another embodiment of a nucleotide sequence of human HtrA-2, the nucleotide at position 401 is cytosine (C). In this embodiment, the amino acid at position 60 is aspartate (D).

[0659] The signal peptide prediction program SIGNALP (Nielsen et al. (1997) Protein Engineering 10:1-6) predicted that human HtrA-2 includes a 17 amino acid signal peptide (amino acid 1 to about amino acid 17 of SEQ ID NO: 32) preceding the mature HtrA-2 protein (corresponding to about amino acid 18 to amino acid 453 of SEQ ID NO: 32). The HtrA-2 protein molecular weight is 48.6 kDa prior to the cleavage of the signal peptide, 47.0 kDa after cleavage of the signal peptide.

[0660] HtrA-2 includes a IGF binding domain (about amino acids 18 to 78 of SEQ ID NO: 32), a Kazal protease inhibitor domain (about amino acids 79 to 126 of SEQ ID NO: 32), a serine protease domain (about amino acids 140 to 347 of SEQ ID NO: 32), and a PDZ domain (about amino acids 348-439 of SEQ ID NO: 32).

[0661] FIGS. 41A-41H shows an alignment of the human HtrA-2 full length nucleic acid sequence with the human HtrA full length nucleic acid sequence. FIGS. 42A-42D shows an alignment of the human HtrA-2 nucleotide coding region with the human HtrA nucleotide coding region. FIGS. 43A-43B shows an alignment of the human HtrA-2 protein sequence with the human HtrA protein sequence. As shown in FIGS. 43A-43B, the human HtrA-2 signal sequence is represented by amino acids 1-17 (and encoded by nucleotides 222-272 of SEQ ID NO: 31), and the human HtrA signal sequence is represented by amino acids 1-22 (and encoded by nucleotides 39-103 of SEQ ID NO: 31). The human HtrA-2 IGF-binding domain sequence is represented by amino acids 18-78 (and encoded by nucleotides 273-455 of SEQ ID NO: 31), and the human HtrA IGF-binding sequence is represented by amino acids 37-94 (and encoded by nucleotides 147-320 of SEQ ID NO: 31). The human HtrA-2 Kazal protease inhibitor domain sequence is represented by amino acids 79-126 (and encoded by nucleotides 456-599 of SEQ ID NO: 31), and the human HtrA Kazal protease inhibitor domain sequence is represented by amino acids 110-155 (and encoded by nucleotides 366-503). The human HtrA-2 serine protease domain sequence is represented by amino acids 140-347 (and encoded by nucleotides 639-1262), and the human HtrA serine protease domain sequence is represented by amino acids 140-369 (and encoded by nucleotides 456-1145). The human HtrA-2 PDZ domain sequence is represented by amino acids 348-439 (and encoded by nucleotides 1263-1538), and the human HtrA PDZ domain sequence is represented by amino acids 370-465 (and encoded by nucleotides 1146-1433).

[0662] FIGS. 41A-41H and FIGS. 42A-42D show that there is an overall 50.9% identity between the full length human HtrA-2 nucleic acid molecule and the full length human HtrA nucleic acid molecule, and an overall 62.3% identity between the open reading frame of human HtrA-2 nucleic acid molecule and the open reading frame of the human HtrA nucleic acid molecule, respectively. The amino acid alignment in FIGS. 43A-43B shows a 56.5% overall amino acid sequence identity between human HtrA-2 and human HtrA.

[0663] Clone EpT214, which encodes human HtrA-2, was deposited with the American Type Culture Collection (10801 University Boulevard, Manassas, Va. 20110-2209) on Sep. 25, 1998 and assigned Accession Number 98899. This deposit will be maintained under the terms of the Budapest Treaty on the International Recognition of the Deposit of Microorganisms for the Purposes of Patent Procedure. This deposit was made merely as a convenience for those of skill in the art and is not an admission that a deposit is required under 35 U.S.C. §112.

[0664] FIG. 40A depicts a hydropathy plot of human HtrA-2.

[0665] Northern analysis of HtrA-2 expression in human tissues showed that an approximately 2.6 kB transcript is expressed in human adult heart, skeletal muscle, lung, pancreas, and placenta. No expression was detected in the kidney or brain. In comparison, Northern analysis of HtrA expression in human tissue (Zumbrunn, et al. (1996) FEBS Lett. 398:187-192) indicated that an approximately 2.3 kB transcript is strongly expressed in human placenta, moderately expressed in human brain, liver, and kidney, and weakly expressed in human lung, skeletal muscle, heart, and pancreas.

[0666] Library Array Expression: Expression of human HtrA-2 mRNA was detected by a library array procedure. Briefly, this entailed preparing a PCR mixture by adding standard reagents (e.g., Taq Polymerase, dNTPs, and PCR buffer) a vector primer, a primer internal to the gene of interest, and an aliquot of a library in which expression was to be tested. This procedure was performed with many libraries at a time in a 96 well PCR tray, with 80 or more wells containing libraries and a control well in which the above primers were combined with the clone of interest itself. The control well served as an indicator of the fragment size to be expected in the library wells, in the event the clone of interest was expressed within. Amplification was performed in a PCR machine, employing standard PCR conditions for denaturing, annealing, and elongation, and the resultant mixture was mixed with an appropriate loading dye and run on an ethidium bromide-stained agarose gel. The gel was later viewed with UV light after the DNA loaded within its lanes had time to migrate into the gels. Lanes in which a band corresponding with the control band was visible indicated the libraries in which the clone of interest was expressed.

[0667] Expression was detected in human umbilical endothelial cells and human lean subcutaneous adipose tissue. No expression was detected in kidney, testes, prostate, HMC-1 control (mast cell line), fetal dorsal spinal cord, human colon to liver metastasis, erythroblasts from CD34+ blood, human spinal cord (ION 3), HUVEC TGF-B (human umbilical endothelia), HUVEC (human umbilical endothelia), Brain, K563 (red blood cell line), uterus, Hep-G2 (human insulinoma), human normal colon, human colon to liver metastasis, skin, HUVEC controls (umbilical endothelial cells), human colon (inflammatory bowel disease), melanoma (G361 cell line), adult bone marrow CD34+ cells, HPK, human lung, mammary gland, normal breast epithelium, colon to liver metastasis (CHT128), normal breast, bone marrow (CD34+), W138 (human embryonic lung), Th1 cells, HUVEC untreated (umbilical endothelium), uterus, liver, spleen, normal human Ovarian Epithelia, colon to liver metastasis (CHT133), PTH-treated osteoblasts, ovarian ascites, lung squamous cell carcinoma (MDA 261), Th2 cells, IBD colon (WUM 23), thymus, heart, small intestine, normal megakaryoctyes, colon carcinoma (NDR109), lung adenocarcinoma (PIT245), IBD colon (WUM6), brain-subcortical white matter (ION2), prostate tumor xenograft A12, trigeminal ganglia, 9 week fetus, retinal pigmentosa epithelia, bone marrow, colon carcinoma (NDR103), lung squamous cell carcinoma (PIT299), cervical cancer, normal prostate, prostate tumor, xenograft K10, lumbrosacaral spinal cord, A549 control, stomach, retina, Th-1 induced T cell, colon carcinoma (NDR82), d8 dendritic cells, spinal cord, ovarian epithelial tumor, prostate cancer to liver metastasis JHH3, lumbrosacaral dorsal root ganglia, salivary gland, skeletal muscle, HMC-1 (human mast cell line), Th-2 induced T-cell, colon carcinoma (NDR097), megakaryocytes, dorsal root ganglia (ION 6, 7, 8), HUVEC L-NAME (umbilical endothelia), prostate cancer to liver metastasis JHH4, dorsal root ganglia (ION 6, 7, 8), HMVEC: micro vascular endothelial cells, fetal brain, bronchial epithelium mix, mesangial cells, fetal heart, LPS-stimulated 24 hours Osteoblasts, cervical carcinoma A2780 WT cell line, UCLA-lung carcinoma R (carcinoma (Resistant to drug treatment)), erythroleukemia cells, trachea, testes, placenta, HUVEC: umbilical vein endothelial cells, bronchial epithelium, congestive heart failure, bladder carcinoma T24 cell line Ctl., mammary gland, burkitt's lymphoma, cervical carcinoma A2780 ADR cell line (drug resistant), UCLA-lung carcinoma S (carcinoma (sensitive to drug treatment)), embryonic keratinocytes, cervix carcinoma ME180 IL-1, testes, mammary gland, HL60/S, astrocytes, cerebellum, bladder carcinoma T24 Tr., natural killer cells, fetal spleen, Prostate, fetal fibroblast, SCC25 CDDP—tongue squamous carcinoma, cervix carcinoma, ME 180 control, RAJI—human burkitt's lymphoma B cell, small intestine, U937/A10P 10, prostate epithelium, pituitary, prostate fibroblast, congestive heart failure, uterine smooth Muscle, treated, esophagus, p65 IL-1, SCC25 WT-tongue squamous cell carcinoma, MCP-1 mast cell line, ST486 (Lymphoma B cell), fetal liver, U937/A10p50, primary osteoblast, Aortic endothelial cells, bone marrow, prostate smooth muscle, umbilical smooth muscle, treated, fetal liver, lung carcinoma A549 control, fetal hypothalamus, HPK II keratinocyte cell line, HL60 (acute Promyelocytic Leukemia), skeletal muscle, CaCo, keratinocytes, fetal Kidney, congestive heart failure, thyroid, bronchial smooth muscle, fetal skin, A549IL-1, T cells, CD3 treated, lung, umbilical smooth muscle, treated, stomach, HeLa cells, melanocytes, fetal liver, adrenal gland, LPS-stimulated osteoblasts, 1 hour, WT LNCap+ casodex, fetal adrenal gland, fetal testes, T cells, CD3 IL-4/IL-10 treated, heart, uterine smooth muscle, spleen, HL60/Adr, coronary smooth muscle cells, fetal lung, fetal thymus, LPS-stimulated 6 hour osteoblasts, WT LNCap+ Testosterone, midterm placenta, pulmonary artery smooth muscle, T cells, CD3 IFN-γ/TFN-α treated, fetal brain, and liver.

[0668] MOUSE HtrA-2

[0669] A mouse homolog of human HtrA-2 was identified. A cDNA encoding mouse HtrA-2 was identified by analyzing the sequences of clones present in a mouse cDNA library. This analysis led to the identification of a clone, Atmx2143, encoding full-length mouse HtrA-2. The mouse HtrA-2 cDNA of this clone is 1563 nucleotides long (FIGS. 44A-44C; SEQ ID NO: 33). The open reading frame of this cDNA (nucleotides 268 to 1311 of SEQ ID NO: 33) and encodes a 349 amino acid secreted protein (SEQ ID NO: 34).

[0670] In one embodiment of a nucleotide sequence of mouse HtrA-2, the nucleotide at position 396 is an guanine (G). In this embodiment, the amino acid at position 43 is glutamate (E). In another embodiment of a nucleotide sequence of mouse HtrA-2, the nucleotide at position 396 is a cytosine (C). In this embodiment, the amino acid at position 43 is aspartate (D). In another embodiment of a nucleotide sequence of mouse HtrA-2, the nucleotide at position 426 is guanine (G). In this embodiment, the amino acid at position 53 is glutamate (E). In another embodiment of a nucleotide sequence of mouse HtrA-2, the nucleotide at position 426 is cytosine (C). In this embodiment, the amino acid at position 53 is aspartate (D). In another embodiment of a nucleotide sequence of mouse HtrA-2, the nucleotide at position 498 is guanine (G). In this embodiment, the amino acid at position 77 is glutamate (E). In another embodiment of a nucleotide sequence of mouse HtrA-2, the nucleotide at position 498 is cytosine (C). In this embodiment, the amino acid at position 77 is aspartate (D).

[0671] HtrA-2 mRNA expression in mouse: In situ tissue screening was performed on mouse adult and embryonic tissue to analyze for the expression of mouse HtrA-2 mRNA. In summary, adult expression was highest in the bladder and present to a lesser extent in heart, muscle, and colon. Signal in these tissues was ubiquitous. All other adult tissues showed no specific signal above background. Expression at embryonic day 13.5, the earliest age tested, was observed in the stomach and brain. Expression pattern in brain was punctate, broadly distributed, and sparse. Beginning at E14.5 ubiquitous expression was also observed in skeletal muscle, diaphragm, intestine, and lung. This pattern continues until postnatal day 1.5, when expression was also apparent in the renal medulla. There was high background in what appears to be cartilage. The antisense probe showed a stronger signal in this tissue with a more extensive pattern. In particular, with respect to adult mouse expression, expression was ubiquitous in each of the bladder, heart, skeletal muscle, and colon. No expression was detected in the following tissues: lung, brain, placenta, liver, pancreas, thymus, eye, kidney, and the small intestine. With respect to expression in the embryonic mouse, the following results were obtained: At E13.5, expression was detected in the stomach and brain. Signal was also observed in the limbs and vertebrae with the sense probe. This signal was much higher and more extensive with the antisense probe. At E14.5, E15.5, E16.5, E18.5, and P1.5, a signal was punctuate in the brain, strong in renal medulla and absent from liver. Most other tissues had low level ubiquitous expression to some degree.

[0672] Uses of HtrA-2 (TANGO 214) Nucleic Acids Polypeptides, and Modulators Thereof

[0673] As HtrA-2 was originally found in an LPS-treated osteoblast library and is homologous to HtrA, mRNA levels of which are known to be elevated in cartilage from individuals with osteoarthritis, HtrA-2 nucleic acids, proteins, and modulators thereof can be used to treat bone and/or cartilage associated diseases or disorders. Examples of bone and/or cartilage diseases and disorders include bone and/or cartilage injury due to for example, trauma (e.g., bone breakage, cartilage tearing), degeneration (e.g., osteoporosis), degeneration of joints, e.g., arthritis, e.g., osteoarthritis, and bone wearing.

[0674] As HtrA-2, like HtrA, is highly expressed in the heart, and includes an IGF-binding domain, and thus likely has a role in modulating IGF function (e.g., IGF is involved in cardiac hyperplasia), HtrA-2 nucleic acids, proteins, and modulators thereof can be used to treat disorders of the cardiovascular system. Examples of disorders of the cardiovascular system include various forms of heart disease include but are not limited to: aortic valve prolapse; aortic valve stenosis; arrhythmia; cardiogenic shock; heart attack; heart failure; heart tumor; heart valve pulmonary stenosis; mitral regurgitation (acute); mitral regurgitation (chronic); mitral stenosis; mitral valve prolapse; stable angina; tricuspid regurgitation, angina pectoris, myocardial infarction, and chronic ischemic heart disease, hypertensive heart disease, pulmonary heart disease, valvular heart disease (e.g., rheumatic fever and rheumatic heart disease, endocarditis, mitral valve prolapse, and aortic valve stenosis), congenital heart disease (e.g., valvular and vascular obstructive lesions, atrial or ventricular septal defect, and patent ductus arteriosus), or myocardial disease (e.g., myocarditis, congestive cardiomyopathy, and hypertrophic cardiomyopathy). Disorders of the vasculature that can be treated or prevented according to the methods of the invention include atheroma, tumor angiogenesis, wound healing, diabetic retinopathy, hemangioma, psoriasis, and restenosis, e.g., restenosis resulting from balloon angioplasty.

[0675] More particularly, HtrA-2 nucleic acids, proteins, and modulators thereof can be used to treat congestive heart failure may affect either the right side, left side, or both sides of the heart. Further, HtrA-2 nucleic acids, proteins, and modulators thereof can be used to treat structural or functional causes of heart failure include high blood pressure (hypertension), heart valve disease, and other heart diseases.

[0676] HtrA-2 nucleic acids, proteins, and modulators thereof can also be used to treat cardiomyopathy. Specific types of cardiomyopathy include: ischemic cardiomyopathy; idiopathic cardiomyopathy; hypertrophic cardiomyopathy; alcoholic cardiomyopathy; peripartum cardiomyopathy; dilated cardiomyopathy; and restrictive cardiomyopathy.

[0677] The presence of an IGF binding domain in HtrA-2 also suggests that HtrA-2 can modulate IGF function and thereby be used to treat IGF associated disorders. IGFs are known to be involved in the overall cellular growth of embryos and organs of mammals. When existing at excessive levels, however, IGFs can cause somatic overgrowth which leads to conditions such as visceromegaly, placentomegaly, cardiac and adrenal defects, and Beckwith-Weidermann syndrome. Thus, HtrA-2 nucleic acids, proteins, and modulators thereof can be used to treat IGF-associated disorders as described above. In addition, as IGF can cause increased cell proliferation, HtrA-2 nucleic acids, proteins, and modulators thereof can be used to treat proliferative disorders, e.g., cancer, e.g., cancer of a cell or tissue in which HtrA-2 is expressed.

[0678] The presence of a Kazal protease inhibitor domain in HtrA-2 also indicates that HtrA-2 can function in a similar manner as other proteins containing a Kazal protease inhibitor domain. For example, follistatin includes a Kazal protease inhibitor domain. Follistatin regulates the availability of growth factors and embryonic growth, and thus modulators thereof can be used to treat disorders involving abnormal cellular migration, proliferation, and differentiation. Similarly, HtrA-2 nucleic acids, proteins, and modulators thereof can be used to treat disorders involving abnormal cellular migration, proliferation (e.g., cancer), and/or differentiation, and/or follistatin-associated disorders.

[0679] As HtrA-2 includes a serine protease domain, it can act as a serine protease. Thus, HtrA-2 nucleic acids, proteins, and modulators thereof can be used to treat disorders involving abnormal serine protease function. For example, it is known that serine protease inhibitors are abundant in plaques found in Alzheimer's patients, and may be responsible for preventing some types of metalloproteinase from breaking down the beta-amyloid proteins that make up these plaques. Thus, modulation of the HtrA-2 serine protease activity may modulate formation of Alzheimer's plaques. Consequently, HtrA-2 nucleic acids, proteins, and modulators thereof can be used to treat Alzheimer's disease.

[0680] The presence of a PDZ domain in HtrA-2 suggests that HtrA-2 functions in a manner similar to other PDZ-containing proteins. For example, PDZ domains typically bind other proteins at their carboxyl termini in a sequence-specific manner.

[0681] Human HtrA-2 nucleic acids, proteins, and modulators thereof can also be used to treat neurological disorders. Examples of such neurological disorders include disorders due to nerve damage (e.g., nerve damage due to stroke) and neurodegenerative diseases (e.g., Alzheimer's disease, multiple sclerosis, Huntington's disease, and Parkinson's disease). In addition, human HtrA-2 nucleic acids, polypeptides, and modulators thereof can be used to treat neurodegeneration associated with Alzheimer's disease, frontal lobe dementia, cortical lewy body disease, dementia of Parkinson's disease, acute and chronic phases of degeneration following stroke or head injury, neuronal degeneration found in motor neuron disease, AIDS dementia and chronic epilepsy.

[0682] HtrA-2, like HtrA, can likely interact with a normal or mutated gene product of a human presenilin gene (e.g., human presenilin-1 (PS-1), e.g., the hydrophobic loop domain between transmembrane domains 1 and 2 of PS-1). As mutations in the human PS-1 gene lead to Familial Alzheimer's disease (see PCT Publication Number W098/01549, the contents of which are incorporated by reference), and HtrA-2 can interact with PS-1 and thus modulate PS-1 function, HtrA-2 nucleic acids, proteins, and modulators thereof can be used to treat Alzheimer's disease and physiological functions associated with Alzheirner's disease.

[0683] The PS-1 gene product may also be a receptor or channel protein, mutations in which have been causally related to neurological disorders whose pathology does not represent Alzheimer's disease. Thus, HtrA-2 nucleic acids, proteins, and modulators thereof can be used to treat non-Alzheimer's neurological disorders as well (e.g., malignant hyperthermia, hyperkalemic periodic paralysis).

[0684] HtrA-2 nucleic acids, proteins, and modulators thereof can also be used to treat disorders of the cells and tissues in which it is expressed. As HtrA-2 is expressed in colon, bladder, skeletal muscle, lung, pancreas, and placenta, HtrA-2 nucleic acids, proteins, and modulators thereof can be used to treat disorders of these cells, tissues, or organs, e.g., colon cancer and colonic volvulus, diverticula, cystitis, urinary tract infection, bladder cancer, muscular dystrophy, stroke, muscular atrophy, trichinosis, lung cancer, cystic fibrosis, rheumatoid lung disease, pancreatic cancer, diabetes, pancreatitis, and various placental disorders.

[0685] Because HtrA-2 was expressed in adipose tissue, HtrA-2 nucleic acids, proteins and modulators thereof can be utilized to modulate adipocyte function and adipocyte-related processes and disorders such as, e.g., obesity, regulation of body temperature, lipid metabolism, carbohydrate metabolism, body weight regulation, obesity, anorexia nervosa, diabetes mellitus, unusual susceptibility or insensitivity to heat or cold, arteriosclerosis, atherosclerosis, and disorders involving abnormal vascularization, e.g., vascularization of solid tumors. Additionally, such molecules can be used to treat disorders associated with abnormal fat metabolism, e.g., cachexia. In another example, such molecules can be used to treat disorders associated with abnormal proliferation of these tissues, e.g., cancer, e.g., breast cancer or liver cancer.

[0686] Human TANGO 221

[0687] A cDNA encoding TANGO 221 was identified by analyzing the sequences of clones present in a non-obese human subcutaneous adipose tissue cDNA library. This analysis led to the identification of a clone, Athfa28cl2, encoding full-length TANGO 221. The cDNA of this clone is 1061 nucleotides long (FIG. 45; SEQ ID NO: 35). It is noted that the nucleotide sequence contains a Not I adapter sequence on the ₃′ end. The open reading frame of this cDNA, nucleotides 6 to 716, encodes a 237 amino acid secreted protein (SEQ ID NO: 36).

[0688] In one embodiment of a nucleotide sequence of human TANGO 221, the nucleotide at position 128 is a guanine (G). In this embodiment, the amino acid at position 41 is glutamate (E). In another embodiment of a nucleotide sequence of human TANGO 221, the nucleotide at position 128 is a cytosine (C). In this embodiment, the amino acid at position is 41 aspartate (D). In another embodiment of a nucleotide sequence of human TANGO 221, the nucleotide at position 131 is adenine (A). In this embodiment, the amino acid at position 42 is glutamate (E). In another embodiment of a nucleotide sequence of human TANGO 221, the nucleotide at position 131 is cytosine (C). In this embodiment, the amino acid at position 42 is aspartate (D). In another embodiment of a nucleotide sequence of human TANGO 221, the nucleotide at position 134 is guanine (G). In this embodiment, the amino acid at position 43 is glutamate (E). In another embodiment of a nucleotide sequence of human TANGO 221, the nucleotide at position 134 is cytosine (C). In this embodiment, the amino acid at position 43 is aspartate (D)).

[0689] The signal peptide prediction program SIGNALP (Nielsen et al. (1997) Protein Engineering 10:1-6) predicted that TANGO 221 includes an 17 amino acid signal peptide (amino acid 1 to about amino acid 17 of SEQ ID NO: 36) preceding the mature TANGO 221 protein (corresponding to about amino acid 18 to amino acid 237 of SEQ ID NO: 36). TANGO 221 is predicted to have a molecular weight of 24.7 kDa prior to cleavage of its signal peptide and a molecular weight of 22.8 kDa subsequent to cleavage of its signal peptide.

[0690] In certain embodiments, a TANGO 221 family member has the amino acid sequence of SEQ ID NO: 36, and the signal sequence is located at amino acids 1 to 15, 1 to 16, 1 to 17, 1 to 18, or 1 to 19. In such embodiments of the invention, the domains and the mature protein resulting from cleavage of such signal peptides are also included herein. For example, the cleavage of a signal sequence consisting of amino acids 1-17, results in a mature TANGO 221 protein corresponding to amino acids 18 to 237. The signal sequence is normally cleaved during processing of the mature protein.

[0691] A casein kinase II phosphorylation site having the sequence SRLD is found from amino acids 208 to 211. A protein kinase C phosphorylation site having the sequence TGR is found from amino acids 59 to 61. A second protein kinase C phosphorylation site having the sequence SRR is found from amino acids 174 to 176. A third protein kinase C phosphorylation site having the sequence SGR is found from amino acids 190 to 192. A fourth protein kinase C phosphorylation site having the sequence SSR is found from amino acids 207 to 209. An N-myristoylation site having the sequence GQQPSQ is found from amino acids 28 to 33. A second N-myristoylation site having the sequence GTGRCS is found from amino acids 58 to 63. A third second N-myristoylation site having the sequence GASPCV is found from amino acids 64 to 69. A fourth N-myristoylation site having the sequence GAQRAE is found from amino acids 71 to 76. A fifth N-myristoylation site having the sequence GAGLTE is found from amino acids 91 to 96. A sixth N-myristoylation site having the sequence GGGAGQ is found from amino acids 101 to 106. A seventh N-myristoylation site having the sequence GLHQGG is found from amino acids 107 to 112. An eighth N-myristoylation site having the sequence GLASG R is found from amino acids 187 to 192. A ninth N-myristoylation site having the sequence GVGLGS is found from amino acids 223 to 228. An amidation site having the sequence GGRR is found from amino acids 177 to 180.

[0692] A clone EpT221, which encodes human TANGO 221, was deposited with the American Type Culture Collection (10801 University Boulevard, Manassas, Va. 20110-2209) on Jan. 7, 1999 and assigned Accession Number 207044. This deposit will be maintained under the terms of the Budapest Treaty on the International Recognition of the Deposit of Microorganisms for the Purposes of Patent Procedure. This deposit was made merely as a convenience for those of skill in the art and is not an admission that a deposit is required under 35 U.S.C. §112.

[0693] FIG. 46 depicts a hydropathy plot of human TANGO 221. The dashed vertical line separates the signal sequence (amino acids 1-17 of SEQ ID NO: 36) on the left from the mature protein (amino acids 18-237 of SEQ ID NO: 36) on the right.

[0694] Uses of TANGO 221 Nucleic Acids, Polypeptides, and Modulators Thereof

[0695] Because TANGO 221 is expressed in cells of subcutaneous adipose tissue, breast tissue, and fetal liver and spleen tissue, TANGO 221 polypeptides, nucleic acids, and modulators thereof, can be used to modulate the function, morphology, proliferation and/or differentiation of cells in the tissues in which it is expressed. For example, TANGO 221 nucleic acids, proteins and modulators thereof can be utilized to modulate adipocyte function and adipocyte-related processes and disorders such as, e.g., obesity, regulation of body temperature, lipid metabolism, carbohydrate metabolism, body weight regulation, obesity, anorexia nervosa, diabetes mellitus, unusual susceptibility or insensitivity to heat or cold, arteriosclerosis, atherosclerosis, and disorders involving abnormal vascularization, e.g., vascularization of solid tumors. Additionally, such molecules can be used to treat disorders associated with abnormal fat metabolism, e.g., cachexia. In another example, such molecules can be used to treat disorders associated with abnormal proliferation of these tissues, e.g., cancer, e.g., breast cancer or liver cancer.

[0696] As TANGO 221 exhibits expression in the spleen, TANGO 221 nucleic acids, proteins, and modulators thereof can be used to modulate the proliferation, differentiation, and/or function of cells that form the spleen, e.g., cells of the splenic connective tissue, e.g., splenic smooth muscle cells and/or endothelial cells of the splenic blood vessels. TANGO 221 nucleic acids, proteins, and modulators thereof can also be used to modulate the proliferation, differentiation, and/or function of cells that are processed, e.g., regenerated or phagocytized within the spleen, e.g., erythrocytes and/or B and T lymphocytes and macrophages. Thus, TANGO 221 nucleic acids, proteins, and modulators thereof can be used to treat spleen, e.g., the fetal spleen, associated diseases and disorders. Examples of splenic diseases and disorders include e.g., splenic lymphoma and/or splenomegaly, and/or phagocytotic disorders, e.g., those inhibiting macrophage engulfment of bacteria and viruses in the bloodstream.

[0697] In another example, because TANGO 221 exhibits expression in the liver, TANGO 221 polypeptides, nucleic acids, or modulators thereof, can be used to treat hepatic (liver) disorders, such as jaundice, hepatic failure, hereditary hyperbiliruinemias (e.g., Gilbert's syndrome, Crigler-Naijar syndromes and Dubin-Johnson and Rotor's syndromes), hepatic circulatory disorders (e.g., hepatic vein thrombosis and portal vein obstruction and thrombosis) hepatitis (e.g., chronic active hepatitis, acute viral hepatitis, and toxic and drug-induced hepatitis) cirrhosis (e.g., alcoholic cirrhosis, biliary cirrhosis, and hemochromatosis), or malignant tumors (e.g., primary carcinoma, hepatoblastoma, and angiosarcoma).

[0698] Human TANGO 222

[0699] A cDNA encoding TANGO 222 was identified by analyzing the sequences of clones present in a non-obese human subcutaneous adipose tissue cDNA library. This analysis led to the identification of a clone, Athfa59d4, encoding full-length TANGO 222. The cDNA of this clone is 745 nucleotides long (FIG. 47; SEQ ID NO: 37). The open reading frame of this cDNA, nucleotides 33 to 434 of SEQ ID NO: 38), encodes a 134 amino acid secreted protein (SEQ ID NO: 38).

[0700] In one embodiment of a nucleotide sequence of human TANGO 222, the nucleotide at position 236 is a guanine (G). In this embodiment, the amino acid at position 68 is glutamate (E). In another embodiment of a nucleotide sequence of human TANGO 222, the nucleotide at position 236 is a cytosine (C). In this embodiment, the amino acid at position 68 is aspartate (D). In another embodiment of a nucleotide sequence of human TANGO 222, the nucleotide at position 305 is thymine (T). In this embodiment, the amino acid at position 91 is aspartate (D). In another embodiment of a nucleotide sequence of human TANGO 222, the nucleotide at position 305 is cytosine (C). In this embodiment, the amino acid at position 91 is glutamate (E). In another embodiment of a nucleotide sequence of human TANGO 222, the nucleotide at position 362 is cytosine (C). In this embodiment, the amino acid at position 110 is aspartate (D). In another embodiment of a nucleotide sequence of human TANGO 222, the nucleotide at position 362 is guanine (G). In this embodiment, the amino acid at position 110 is glutamate (E).

[0701] The signal peptide prediction program SIGNALP (Nielsen et al. (1997) Protein Engineering 10:1-6) predicted that TANGO 222 includes a 19 amino acid signal peptide (amino acid 1 to about amino acid 19 of SEQ ID NO: 38) preceding the mature TANGO 222 protein (corresponding to about amino acid 20 to amino acid 134 of SEQ ID NO: 38). TANGO 222 is predicted to have a molecular weight of 15.1 kDa prior to cleavage of its signal peptide and a molecular weight of 13.1 kDa subsequent to cleavage of its signal peptide.

[0702] In certain embodiments, a TANGO 222 family member has the amino acid sequence of SEQ ID NO: 38, and the signal sequence is located at amino acids 1 to 17, 1 to 18, 1 to 19, 1 to 20, or 1 to 21. In such embodiments of the invention, the domains and the mature protein resulting from cleavage of such signal peptides are also included herein. For example, the cleavage of a signal sequence consisting of amino acids 1-19, results in a mature TANGO 222 protein corresponding to amino acids 20 to 134. The signal sequence is normally cleaved during processing of the mature protein.

[0703] An N-glycosylation site having the sequence NVTM is found from amino acids 27 to 30 of SEQ ID NO: 8. A cGMP-dependent protein kinase phosphorylation site having the sequence KKRS is found from amino acids 121 to 124. A protein kinase C phosphorylation site having the sequence SCK is found from amino acids 33 to 35. A second protein kinase C phosphorylation site having the sequence TLR is found from amino acids 56 to 58. A microbdies C-terminal targeting signal having the sequence SRL is found from amino acids 132 to 134.

[0704] A clone, EpT222, which encodes human TANGO 222, was deposited with the American Type Culture Collection (10801 University Boulevard, Manassas, Va. 20110-2209) on Jan. 7, 1999 and assigned Accession Number 207043. This deposit will be maintained under the terms of the Budapest Treaty on the International Recognition of the Deposit of Microorganisms for the Purposes of Patent Procedure. This deposit was made merely as a convenience for those of skill in the art and is not an admission that a deposit is required under 35 U.S.C. §112.

[0705] FIG. 48 depicts a hydropathy plot of human TANGO 222. The dashed vertical line separates the signal sequence (amino acids 1-19) on the left from the mature protein (amino acids 20-134) on the right.

[0706] Uses of TANGO 222 Nucleic Acids, Polypeptides, and Modulators Thereof

[0707] Because TANGO 222 is expressed in subcutaneous adipose tissue, TANGO 222 polypeptides, nucleic acids, and modulators of TANGO 222 expression or activity can be used to modulate adipocyte function, e.g., fat metabolism. For example, TANGO 222 polypeptides, nucleic acids, and modulators thereof, can be used to modulate the function, morphology, proliferation and/or differentiation of cells in the tissues in which it is expressed. For example, TANGO 222 nucleic acids, proteins and modulators thereof can be utilized to modulate adipocyte function and adipocyte-related processes and disorders such as, e.g., obesity, regulation of body temperature, lipid metabolism, carbohydrate metabolism, body weight regulation, obesity, anorexia nervosa, diabetes mellitus, unusual susceptibility or insensitivity to heat or cold, arteriosclerosis, atherosclerosis, and disorders involving abnormal vascularization, e.g., vascularization of solid tumors. Additionally, such molecules can be used to treat disorders associated with abnormal fat metabolism, e.g., cachexia. In another example, such molecules can be used to treat disorders associated with abnormal proliferation of these tissues, e.g., cancer, e.g., breast cancer or liver cancer. Such molecules can be used to treat disorders associated with abnormal fat metabolism, e.g., obesity, arteriosclerosis, or cachexia.

[0708] Human TANGO 176

[0709] A cDNA encoding human TANGO 176 was identified by analyzing the sequences of clones present in a human pituitary cDNA library. This analysis led to the identification of a clone, Athbb28g6, encoding full-length human TANGO 176. The cDNA of this clone is 1697 nucleotides long (FIGS. 49A-49B; SEQ ID NO: 39). It is noted that the nucleotide sequence contains Sal I and Not I adapter sequences on the 5′ and 3′ ends, respectively. The open reading frame of this cDNA, nucleotides 101 to 1528, encodes a 476 amino acid secreted protein (SEQ ID NO: 40).

[0710] In one embodiment of a nucleotide sequence of human TANGO 176, the nucleotide at position 250 is an adenine (A). In this embodiment, the amino acid at position 50 is glutamate (E). In another embodiment of a nucleotide sequence of human TANGO 176, the nucleotide at position 250 is a cytosine (C). In this embodiment, the amino acid at position 50 is aspartate (D). In another embodiment of a nucleotide sequence of human TANGO 176, the nucleotide at position 277 is adenine (A). In this embodiment, the amino acid at position 59 is glutamate (E). In another embodiment of a nucleotide sequence of human TANGO 176, the nucleotide at position 277 is cytosine (C). In this embodiment, the amino acid at position 59 is aspartate (D). In another embodiment of a nucleotide sequence of human TANGO 176, the nucleotide at position 400 is adenine (A). In this embodiment, the amino acid at position 100 is glutamate (E). In another embodiment of a nucleotide sequence of human TANGO 176, the nucleotide at position 400 is cytosine (C). In this embodiment, the amino acid at position 100 is aspartate (D).

[0711] The signal peptide prediction program SIGNALP (Nielsen et al. (1997) Protein Engineering 10:1-6) predicted that human TANGO 176 includes a 22 amino acid signal peptide (amino acid 1 to about amino acid 22 of SEQ ID NO: 40) preceding the mature TANGO 176 protein (corresponding to about amino acid 23 to amino acid 476 of SEQ ID NO: 40). Human TANGO 176 is predicted to have a molecular weight of approximately 71 kDa prior to cleavage of its signal peptide and a molecular weight of approximately 68 kDa subsequent to cleavage of its signal peptide.

[0712] In certain embodiments, a TANGO 176 family member has the amino acid sequence of SEQ ID NO: 40, and the signal sequence is located at amino acids 1 to 19, 1 to 20, 1 to 21, 1 to 22, 1 to 23, or 1 to 24. In such embodiments of the invention, the domains and the mature protein resulting from cleavage of such signal peptides are also included herein. For example, the cleavage of a signal sequence consisting of amino acids 1 to 22, results in a mature TANGO 176 protein corresponding to amino acids 23 to 476. The signal sequence is normally cleaved during processing of the mature protein.

[0713] An N-glycosylation site having the sequence NKTY is found from amino acids 81 to 84. A second N-glycosylation site having the sequence NMTL is found from amino acids 5132 to 135. A third N-glycosylation site having the sequence NVTG is found from amino acids 307 to 310. A fourth N-glycosylation site having the sequence NQTF is found from amino acids 346 to 349. A protein kinase C phosphorylation site having the sequence TLR is found from amino acids 134 to 136. A second protein kinase C phosphorylation site having the sequence SVK is found from amino acids 366 to 368. A third protein kinase C phosphorylation site having the sequence TER is found from amino acids 396 to 398. A casein kinase II phosphorylation site having the sequence TLRD is found from amino acids 134 to 137. A second casein kinase II phosphorylation site having the sequence SFTD is found from amino acids 160 to 163. A third casein kinase II phosphorylation site having the sequence SDPE is found from amino acids 240 to 243. A fourth casein kinase II phosphorylation site having the sequence TEPE is found from amino acids 321 to 324. A fifth casein kinase II phosphorylation site having the sequence SLPE is found from amino acids 334 to 337. A sixth casein kinase II phosphorylation site having the sequence TFND is found from amino acids 348 to 351. A seventh casein kinase II phosphorylation site having the sequence TIVE is found from amino acids 353 to 356. An eighth casein kinase II phosphorylation site having the sequence SDSE is found from amino acids 424 to 427. A tyrosine kinase phosphorylation site having the sequence KSDSEVAGY is found from amino acids 423 to 431. An N-myristoylation site having the sequence GLFRSL is found from amino acids 22 to 27. A second N-myristoylation site having the sequence GGPGGS is found from amino acids 110 to 115. A third N-myristoylation site having the sequence GTGFSF is found from amino acids 156 to 161. A fourth N-myristoylation site having the sequence GIAIGD is found from amino acids 232 to 237. A serine active site, e.g., from a serine carboxypeptidase, having the sequence VTGESYAG is found from amino acids 200 to 207. A beta and gamma ‘Greek key’ motif signature, e.g., from crystallins, having the sequence MNNYKVLIYNGQLDII is found from amino acids 375 to 390.

[0714] There are four conserved cysteines in the extracellular domain at positions 271, 274, 311, and 320. Human TANGO 176 has a high proportion of charged amino acids in the predicted extracellular (20%, not including histidines) and cytoplasmic (29%) domains. Human TANGO 176 is predicted to have a molecular weight of 54.2 kDa prior to cleavage of its signal peptide and a molecular weight of 51.9 kDa subsequent to cleavage of its signal peptide.

[0715] Secretion assays indicate that the polypeptide encoded by human TANGO 176 is secreted. The secretion assays were performed essentially as follows: 8×10⁵ 293T cells were plated per well in a 6-well plate and the cells were incubated in growth medium (DMEM, 10% fetal bovine serum, penicillin/strepomycin) at 37° C., 5% CO₂ overnight. 293T cells were transfected with 2 μg of full-length TANGO 176 inserted in the pMET7 vector/well and 10 μg LipofectAMINE (GIBCO/BRL Cat. # 18324-012)/well according to the protocol for GIBCO/BRL LipofectAMINE. The transfectant was removed 5 hours later and fresh growth medium was added to allow the cells to recover overnight. The medium was removed and each well was gently washed twice with DMEM without methionine and cysteine (ICN Cat. # 16-424-54). 1 ml DMEM without methionine and cysteine with 50 μCi Trans-³⁵S (ICN Cat. # 51006) was added to each well and the cells were incubated at 37° C., 5% CO₂ for the appropriate time period. A 150 μl aliquot of conditioned medium was obtained and 150 μl of 2×SDS sample buffer was added to the aliquot. The sample was heat-inactivated and loaded on a 4-20% SDS-PAGE gel. The gel was fixed and the presence of secreted protein was detected by autoradiography.

[0716] A clone, EpT176, which encodes human TANGO 176, was deposited as with the American Type Culture Collection (10801 University Boulevard, Manassas, Va. 20110-2209) on Jan. 7, 1999 and assigned Accession Number 207042. This deposit will be maintained under the terms of the Budapest Treaty on the International Recognition of the Deposit of Microorganisms for the Purposes of Patent Procedure. This deposit was made merely as a convenience for those of skill in the art and is not an admission that a deposit is required under 35 U.S.C. §112.

[0717] FIG. 50 depicts a hydropathy plot of human TANGO 176. The dashed vertical line separates the signal sequence (amino acids 1-22) on the left from the mature protein (amino acids 23-476) on the right.

[0718] A human TANGO 176 polypeptide differs from known molecules (e.g., the serine carboxypeptidase of WO 98/44128) at the sequence KAE found from amino acids 413 to 415. In human TANGO 176, the sequence is KAE. In known molecules, the sequence is AEK. Human TANGO 176 exhibited the most homology with mosquito vitellogenic carboxypetidase.

[0719] Northern analysis of human TANGO 176 mRNA revealed expression in a wide range of tissues including heart, spleen, kidney, placenta, and peripheral blood leukocytes. Human TANGO 176 mRNA expression was not detected in the brain, skeletal muscle, colon, thymus, liver, small intestine, and lung.

[0720] Mouse TANGO 176

[0721] A cDNA encoding mouse TANGO 176 was identified by analyzing the sequences of clones present in a mouse alveolar macrophage cell line cDNA library. This analysis led to the identification of a clone, jtmca099e05 encoding full-length mouse TANGO 176. The mouse TANGO 176 cDNA of this clone is 1904 nucleotides long (FIGS. 51A-51B; SEQ ID NO: 41). It is noted that the nucleotide sequence contains Sal I and Not I adapter sequences on the 5′ and 3′ ends, respectively. The open reading frame of this cDNA, nucleotides 49 to 1524, encodes a 492 amino acid secreted protein depicted in SEQ ID NO: 42.

[0722] In one embodiment of a nucleotide sequence of mouse TANGO 176, the nucleotide at position 81 is an guanine (G). In this embodiment, the amino acid at position 11 is glutamate (E). In another embodiment of a nucleotide sequence of mouse TANGO 176, the nucleotide at position 81 is a cytosine (C). In this embodiment, the amino acid at position 11 is aspartate (D). In another embodiment of a nucleotide sequence of mouse TANGO 176, the nucleotide at position 96 is adenine (A). In this embodiment, the amino acid at position 16 is glutamate (E). In another embodiment of a nucleotide sequence of mouse TANGO 176, the nucleotide at position 96 is cytosine (C). In this embodiment, the amino acid at position 16 is aspartate (D). In another embodiment of a nucleotide sequence of mouse TANGO 176, the nucleotide at position 102 is guanine (G). In this embodiment, the amino acid at position 18 is glutamate (E). In another embodiment of a nucleotide sequence of mouse TANGO 176, the nucleotide at position 102 is cytosine (C). In this embodiment, the amino acid at position 18 is aspartate (D).

[0723] The signal peptide prediction program SIGNALP (Nielsen et al. (1997) Protein Engineering 10:1-6) predicted that mouse TANGO 176 includes a 41 amino acid signal peptide (amino acid 1 to about amino acid 41 of SEQ ID NO: 42) preceding the mature mouse TANGO 176 protein (corresponding to about amino acid 42 to amino acid 492 of SEQ ID NO: 42). Mouse TANGO 176 is predicted to have a molecular weight of approximately 74 kDa prior to cleavage of its signal peptide and a molecular weight of approximately 68 kDa subsequent to cleavage of its signal peptide.

[0724] In situ tissue screening was performed on mouse adult and embryonic tissue to analyze for the expression of mouse TANGO 176 mRNA. Expression was observed at moderate to high levels in a number of adult tissues. Expression was generally ubiquitous in positive tissues. Expression during embryogenesis was ubiquitous as well and consistently higher in the liver. A sense control probe was used and had minimal or no signal. Ubiquitous signals were detected in the liver, kidney, adrenal gland, and lymph nodes. A moderate, ubiquitous signal was detected in the submandibular gland. A moderate signal in the mucosal epithelium of the stomach. A signal was observed in the mucosal epithelium and the villi of the small intestine, cortex of the thymus, mucosal epithelium of the colon. A strong signal was observed in the follicles of the spleen. A moderate, ubiquitous signal was observed in the bladder. A moderate signal outlining the seminiferous tubules of the testes was observed. A strong signal was observed in the ovaries. A strong, ubiquitous signal was observed in the placenta. No expression was observed in the following tissues: brain, eye and harderian gland, white fat, brown fat, heart, pancreas, and skeletal muscle.

[0725] In the case of embryonic expression, the following results were obtained: At E13.5, E14.5, E15.5, E16.5, E18.5 and P1.5, a signal was observed ubiquitously. The signal was moderate to strong and slightly stronger in the liver.

[0726] Human and mouse TANGO 176 sequences exhibit considerable similarity at the protein, nucleic acid, and open reading frame levels. An alignment (made using the ALIGN software {Myers and Miller (1989) CABIOS, ver. 2.0}; BLOSUM 62 scoring matrix; gap penalties −12/−4), reveals a protein identity of 29.8%. The human and mouse TANGO 176 cDNAs are 52.9% identical, as assessed using the same software and parameters as indicated (without the BLOSUM 62 scoring matrix). In the respective ORFs, calculated in the same fashion as the full length cDNAs, human and mouse TANGO 176 are 52.9% identical.

[0727] Use of TANGO 176 Nucleic Acids, Polypeptides and Modulators Thereof

[0728] The TANGO 176 protein molecules of the invention comprise a family of proteins with homology to lysosomal protective protein cathepsin A (PPCA), an important enzyme with serine carboxypeptidase activity at lysosomal pH and deamidase/esterase activity at neutral pH. PPCA is thought to be involved in the activation and stabilization of lysosomal P-galactosidase and neuraminidase and can be active extracellularly. PPCA is also thought to affect vaso- and neuroactive peptide activity when released, for example, from cells (e.g., blood cells, such as platelets or white blood cells, macrophages, endothelial cells and fibroblasts), in response to stimulation. PPCA may also have chemotactic activity on neutrophils or monocytes when part of a protein complex formed from PPCA, an alternatively spliced P-galactosidase and neuraminidase. Based on the sequence similarity between TANGO 176 proteins and PPCA, TANGO 176 (and members of the TANGO 176 family) likely function in a manner similar to that of PPCA. Thus, TANGO 176 nucleic acids, polypeptides, and modulators thereof, can be used to treat PPCA-associated disorders. For example, PPCA deficiency is associated with lysosomal accumulation of sialyloligosaccharides, e.g., galactosialidosis (Goldberg Syndrome). PPCA deficiency may also be associated with a defect in neutrophil or monocyte chemotaxis.

[0729] Thus, TANGO 176 polypeptides, nucleic acids, and modulators thereof can be used to treat lysosomal disorders, e.g., sialyloligosaccharide accumulation (e.g., PPCA deficiency or galactosialidosis) and disorders associated with impaired neutrophil or monocyte chemotaxis (e.g., recurrent or chronic bacterial infections).

[0730] TANGO 176 is expressed in pituitary tissue. The pituitary secretes such hormones as thyroid stimulating hormone (TSH), follicle stimulating hormone (FSH), adrenocotropic hormone (ACTH), and others. It controls the activity of many other endocrine glands (thyroid, ovaries, adrenal, etc.). Pituitary related disorders include, among others, acromegaly, Cushing's syndrome, craniopharyngiomas, Empty Sella syndrome, hypogonadism, hypopituitarism, and hypophysitis, in addition to disorders of the endocrine glands the pituitary controls.

[0731] In another example, TANGO 176 polypeptides, nucleic acids, or modulators thereof, can be used to treat disorders of the adrenal cortex, such as hypoadrenalism (e.g., primary chronic or acute adrenocortical insufficiency, and secondary adrenocortical insufficiency), hyperadrenalism (Cushing's syndrome, primary hyperaldosteronism, adrenal virilism, and adrenal hyperplasia), or neoplasia (e.g., adrenal adenoma and cortical carcinoma).

[0732] In another example, TANGO 176 polypeptides, nucleic acids, or modulators thereof, can be used to treat disorders of the adrenal medulla, such as neoplasms (e.g., pheochromocytomas, neuroblastomas, and ganglioneuromas).

[0733] In another example, TANGO 176 polypeptides, nucleic acids, or modulators thereof, can be used to treat disorders of the thyroid gland, such as hyperthyroidism (e.g., diffuse toxic hyperplasia, toxic multinodular goiter, toxic adenoma, and acute or subacute thyroiditis), hypothyroidism (e.g., cretinism and myxedema), thyroiditis (e.g., Hashimoto's thyroiditis, subacute granulomatous thyroiditis, subacute lymphocytic thyroiditis, Riedel's thryroiditis), Graves' disease, goiter (e.g., simple diffuse goiter and multinodular goiter), or tumors (e.g., adenoma, papillary carcinoma, follicular carcinoma, medullary carcinoma, undifferentiated malignant carcinoma, Hodgkin's disease, and non-Hodgkin's lymphoma).

[0734] In another example, TANGO 176 polypeptides, nucleic acids, and modulators thereof can also be used to modulate pituitary function, and thus, to treat disorders associated with abnormal pituitary function. Examples of such disorders include pituitary dwarfism, hyperthyroidism associated with inappropriate thyrotropin secretion, acromegaly, and pituitary growth hormone secreting tumors.

[0735] Because TANGO 176 is expressed in the follicles of the spleen, liver, kidney, adrenal gland, lymph node, submandibular gland, mucosal epithelium of the stomach, mucosal epithelium and the villi of the small intestine, cortex of the thymus, and mucosal epithelium of the colon, the TANGO 176 polypeptides, nucleic acids and/or modulators thereof can be used to modulate the function, morphology, proliferation and/or differentiation of cells in the tissues in which it is expressed.

[0736] Because TANGO 176 is expressed in the kidney, the TANGO 176 polypeptides, nucleic acids and/or modulators thereof can be used to modulate the function, morphology, proliferation and/or differentiation of cells in the tissues in which it is expressed. Such molecules can also be used to treat disorders associated with abnormal or aberrant metabolism or function of cells in the tissues in which it is expressed. Such molecules can be used to treat or modulate renal (kidney) disorders, such as glomerular diseases (e.g., acute and chronic glomerulonephritis, rapidly progressive glomerulonephritis, nephrotic syndrome, focal proliferative glomerulonephritis, glomerular lesions associated with systemic disease, such as systemic lupus erythematosus, Goodpasture's syndrome, multiple myeloma, diabetes, neoplasia, sickle cell disease, and chronic inflammatory diseases), tubular diseases (e.g., acute tubular necrosis and acute renal failure, polycystic renal diseasemedullary sponge kidney, medullary cystic disease, nephrogenic diabetes, and renal tubular acidosis), tubulointerstitial diseases (e.g., pyelonephritis, drug and toxin induced tubulointerstitial nephritis, hypercalcemic nephropathy, and hypokalemic nephropathy) acute and rapidly progressive renal failure, chronic renal failure, nephrolithiasis, vascular diseases (e.g., hypertension and nephrosclerosis, microangiopathic hemolytic anemia, atheroembolic renal disease, diffuse cortical necrosis, and renal infarcts), or tumors (e.g., renal cell carcinoma and nephroblastoma).

[0737] As TANGO 176 exhibits expression in the spleen, TANGO 176 nucleic acids, proteins, and modulators thereof can be used to modulate the proliferation, differentiation, and/or function of cells that form the spleen, e.g., cells of the splenic connective tissue, e.g., splenic smooth muscle cells and/or endothelial cells of the splenic blood vessels. TANGO 176 nucleic acids, proteins, and modulators thereof can also be used to modulate the proliferation, differentiation, and/or function of cells that are processed, e.g., regenerated or phagocytized within the spleen, e.g., erythrocytes and/or B and T lymphocytes and macrophages. Thus, TANGO 176 nucleic acids, proteins, and modulators thereof can be used to treat spleen, e.g., the fetal spleen, associated diseases and disorders. Examples of splenic diseases and disorders include e.g., splenic lymphoma and/or splenomegaly, and/or phagocytotic disorders, e.g., those inhibiting macrophage engulfment of bacteria and viruses in the bloodstream.

[0738] In another example, because TANGO 176 exhibits expression in the liver, TANGO 176 polypeptides, nucleic acids, or modulators thereof, can be used to treat hepatic (liver) disorders, such as jaundice, hepatic failure, hereditary hyperbiliruinemias (e.g. Gilbert's syndrome, Crigler-Naijar syndromes and Dubin-Johnson and Rotor's syndromes), hepatic circulatory disorders (e.g., hepatic vein thrombosis and portal vein obstruction and thrombosis) hepatitis (e.g., chronic active hepatitis, acute viral hepatitis, and toxic and drug-induced hepatitis) cirrhosis (e.g., alcoholic cirrhosis, biliary cirrhosis, and hemochromatosis), or malignant tumors (e.g., primary carcinoma, hepatoblastoma, and angiosarcoma).

[0739] As TANGO 176 exhibits expression in the small intestine, TANGO 176 polypeptides, nucleic acids, or modulators thereof, can be used to treat intestinal disorders, such as ischemic bowel disease, infective enterocolitis, Crohn's disease, benign tumors, malignant tumors (e.g., argentaffinomas, lymphomas, adenocarcinomas, and sarcomas), malabsorption syndromes (e.g., celiac disease, tropical sprue, Whipple's disease, and abetalipoproteinemia), obstructive lesions, hernias, intestinal adhesions, intussusception, or volvulus.

[0740] Mouse TANGO 201

[0741] A cDNA clone, AtmMa41h08, encoding mouse TANGO 201 was identified by analysis of EST sequences from a bone marrow stromal cell cDNA library. The cDNA of this clone is 1758 nucleotides long (FIGS. 52A-52C; SEQ ID NO: 43). The open reading frame of this cDNA (nucleotides 60 to 1508 of SEQ ID NO: 43) encodes a 483 amino acid secreted protein (SEQ ID NO: 44). It is noted that the nucleotide sequence contains a SalI adapter sequence on the 5′ end.

[0742] The signal peptide prediction program SIGNALP (Nielsen et al. (1997) Protein Engineering 10:1-6) predicted that mouse TANGO 201 includes a 33 amino acid signal peptide (amino acid 1 to about amino acid 33 of SEQ ID NO: 44) preceding the mature mouse TANGO 201 protein (corresponding to about amino acid 34 to amino acid 483). Mouse TANGO 201 is predicted to have a molecular weight of 54.9 kDa prior to cleavage of its signal peptide and a molecular weight of 51.7 kDa subsequent to cleavage of its signal peptide. The presence of a methionine residue at positions 69, 154, 185, 193, 212, and 449 indicate that there can be alternative forms of mouse TANGO 201 of 415 amino acids, 330 amino acids, 299 amino acids, 291 amino acids, 272 amino acids, and 35 amino acids of SEQ ID NO: 44, respectively.

[0743] In one embodiment, a mouse TANGO 201 protein (SEQ ID NO: 44) contains a signal sequence of about amino acids 1-33 of SEQ ID NO: 44.

[0744] In certain embodiments, a TANGO 201 family member has the amino acid sequence, and the signal sequence is located at amino acids 1 to 31, 1 to 32, 1 to 33, 1 to 34 or 1 to 35. In such embodiments of the invention, the domains and the mature protein resulting from cleavage of such signal peptides are also included herein. For example, the cleavage of a signal sequence consisting of amino acids 1 to 33 results in a mature TANGO 201 protein corresponding to amino acids 34 to 483 of SEQ ID NO: 44. The signal sequence is normally cleaved during processing of the mature protein.

[0745] The present invention contemplates mutations, which are either naturally occurring or targeted mutations, in the nucleotide sequence resulting in changes in the polypeptide amino acid sequence. More particularly, mutations can be conservative substitutions of an amino acid or amino acids wherein the resulting polypeptide retains essentially the same functional activity. For example, in one embodiment the TANGO 201 nucleotide at position 65 is a cytosine (C). In this embodiment, the amino acid at position 2 is aspartate (D). In another embodiment of a nucleotide sequence of mouse TANGO 201, the nucleotide at position 74 is a guanine (G). In this embodiment, the amino acid at position 5 is glutamate (E) In another embodiment of a nucleotide sequence of mouse TANGO 201, the nucleotide at position 81 is a guanine (G). In this embodiment, the amino acid at position 8 is a valine (V). In another embodiment of a nucleotide sequence of mouse TANGO 201, the nucleotide at position 93 is an adenine (A). In this embodiment, the amino acid at position 12 is a isoleucine (I).

[0746] In another embodiment of a nucleotide sequence of mouse TANGO 201, the nucleotide at position 124 is a thymidine (T). In this embodiment, the amino acid at position 22 is a phenylalanine (F). In another embodiment of a nucleotide sequence of mouse TANGO 201, the nucleotide at position 172 is a cytosine (C). In this embodiment, the amino acid at position 38 is a threonine (T). In another embodiment of a nucleotide sequence of mouse TANGO 201, the nucleotide at position 244 is a guanine (G). In this embodiment, the amino acid at position 62 is an arginine (R). In another embodiment of a nucleotide sequence of TANGO 201, the nucleotide at position 1092 is a thymidine (T). In this embodiment, the amino acid at position 345 is phenylalanine (F). In another embodiment of a nucleotide sequence of mouse TANGO 201, the nucleotide at position 1092 is a cytosine (C). In this embodiment, the amino acid at position 345 is leucine (L) In another embodiment of a nucleotide sequence of mouse TANGO 201, the nucleotide at position 1092 is adenine (A). In this embodiment, the amino acid at position 345 is a isoleucine (I). In another embodiment of a nucleotide sequence of mouse TANGO 201, the nucleotide at position 1092 is guanine (G). In this embodiment, the amino acid at position 345 is a valine (V).

[0747] A glycosaminoglycan attachment site having the sequence SGGG is found from amino acids 28 to 31. A cAMP- and cGMP-dependent protein kinase C (PKC) phosphorylation site having the sequence KKNT is found from amino acids 391 to 394.

[0748] A PKC phosphorylation site having the sequence SYR is found from amino acids 114 to 116. A second PKC phosphorylation site having the sequence SLK is found from amino acids 200 to 202. A third PKC phosphorylation site having the sequence TLR is found from amino acids 273 to 275. A fourth PKC phosphorylation site having the sequence SAK is found from amino acids 298 to 300. A fifth PKC phosphorylation site having the sequence TAR is found from amino acids 394 to 396. A sixth PKC phosphorylation site having the sequence TVR is found from amino acids 407 to 409. A seventh PKC phosphorylation site having the sequence TDK is found from amino acids 424 to 426. An eighth PKC phosphorylation site having the sequence TVK is found from amino acids 431 to 433.

[0749] A casein kinase II (CKII) phosphorylation site having the sequence TSGD is found from amino acids 85 to 88. A second CKII phosphorylation site having the sequence SKHE is found from amino acids 219 to 222. A third CKII phosphorylation site having the sequence SVAE is found from amino acids 225 to 228. A fourth CKII phosphorylation site having the sequence TTCE is found from amino acids 230 to 233. A fifth CKII phosphorylation site having the sequence SAKE is found from amino acids 298 to 301. A sixth CKI phosphorylation site having the sequence TADE is found from amino acids 472 to 475.

[0750] An N-myristoylation (N-MRTL) site having the sequence GGLRSL is found from amino acids 6 to 11. A second N-MRTL site having the sequence GLLEAS is found from amino acids 23 to 28. A third N-MRTL site having the sequence GGGRAL is found from amino acids 29 to 34. A fourth N-MRTL site having the sequence GTEFSL is found from amino acids 49 to 54. A fifth N-MRTL site having the sequence GQKVNI is found from amino acids 14 to 54. A fifth N-MRTL site having the sequence GNMLK is found from amino acids 141 to 146. A sixth N-MRTL site having the sequence GNMLAK is found from amino acids 152 to 157. A seventh N-MRTL site having the sequence GMGNGT is found from amino acids 192 to 197.

[0751] FIG. 53 depicts a hydropathy plot of mouse TANGO 201. The dashed vertical line separates the signal sequence (amino acids 1-33) on the left from the mature protein (amino acids 34-483) on the right.

[0752] Human TANGO 201

[0753] A cDNA clone, Athbb012c06, encoding human TANGO 201 was identified using mouse TANGO 201 cDNA probes on a pituitary library. The human TANGO 201 clone is 2252 nucleotides long (FIGS. 54A-54D; SEQ ID NO: 45). The open reading frame of the cDNA (nucleotides 179 to 1387 of SEQ ID NO: 45) encodes a 403 amino acid protein shown in SEQ ID NO: 46. It is noted that the human TANGO 201 nucleotide sequence contains Sal I and Not I adapter sequences on the 5′ and 3′ ends, respectively.

[0754] The signal peptide prediction program SIGNALP (Nielsen, et al. (1997) Protein Engineering 10:1-6) predicted that human TANGO 201 includes a 33 amino acid signal peptide (amino acid 1 to about amino acid 33 of SEQ ID NO: 46) preceding the mature human TANGO 201 protein (corresponding to about amino acid 34 to amino acid 403 of SEQ ID NO: 46). Human TANGO 201 is predicted to have a molecular weight of 45.9 kDa prior to cleavage of its signal peptide and a molecular weight of 42.8 kDa subsequent to cleavage of its signal peptide. The presence of a methionine residue at positions 69, 154, 185, 193, and 212 indicate that there can be alternative forms of human TANGO 201 of 335 amino acids, 250 amino acids, 219 amino acids, 211 amino acids, and 192 amino acids of SEQ ID NO: 46, respectively.

[0755] In one embodiment, a human TANGO 201 protein (SEQ ID NO: 46) contains a signal sequence of about amino acids 1-33 of SEQ ID NO: 46.

[0756] In certain embodiments, a TANGO 201 family member has the amino acid sequence, and the signal sequence is located at amino acids 1 to 31, 1 to 32, 1 to 33, 1 to 34 or 1 to 35. In such embodiments of the invention, the domains and the mature protein resulting from cleavage of such signal peptides are also included herein. For example, the cleavage of a signal sequence consisting of amino acids 1 to 33 results in a mature TANGO 201 protein corresponding to amino acids 34 to 403 of SEQ ID NO: 46. The signal sequence is normally cleaved during processing of the mature protein.

[0757] A glycosaminoglycan attachment site having the sequence SGGG is found from amino acids 28 to 31. A cAMP- and cGMP-dependent protein kinase phosphorylation site having the sequence KKNT is found from amino acids 337 to 340. A protein kinase C (PKC) phosphorylation site having the sequence SYR is found from amino acids 114 to 116. A second PKC phosphorylation site having the sequence SLK is found from amino acids 200 to 202. A third PKC phosphorylation site having the sequence TLR is found from amino acids 273 to 275. A fourth PKC phosphorylation site having the sequence SGK is found from amino acids 317 to 319. A fifth PKC phosphorylation site having the sequence TAR is found from amino acids 340 to 342. A sixth PKC phosphorylation site having the sequence TVR is found from amino acids 353 to 355. A casein kinase II (CKII) phosphorylation site having the sequence TSGD is found from amino acids 85 to 88. A second CKII phosphorylation site having the sequence SKHE is found from amino acids 219 to 222. A third CKII phosphorylation site having the sequence SVAE is found from amino acids 225 to 228. A fourth CKII phosphorylation site having the sequence TTCE is found from amino acids 230 to 233. A fifth CKII phosphorylation site having the sequence TADE is found from amino acids 392 to 395. An N-myristoylation (N-MRTL) site having the sequence GGVRSL is found from amino acids 6 to 11. A second N-MRTL site having the sequence GLLEAS is found from amino acids 23 to 28. A third N-MRTL site having the sequence GGGRAL is found from amino acids 29 to 34. A fourth N-MRTL site having the sequence GTEFSL is found from amino acids 49 to 54. A fifth N-MRTL site having the sequence GQKINI is found from amino acids 141 to 146. A sixth N-MRTL site having the sequence GNMLAK is found from amino acids 152 to 157. A seventh N-MRTL site having the sequence GMGNGT is found from amino acids 192 to 197.

[0758] Clone Athbb012c06, which encodes human TANGO 201, was deposited as a composite deposit with the American Type Culture Collection (10801 University Boulevard, Manassas, Va. 20110-2209) on Jan. 22, 1999 and assigned Accession Number 207081. This deposit will be maintained under the terms of the Budapest Treaty on the International Recognition of the Deposit of Microorganisms for the Purposes of Patent Procedure. This deposit was made merely as a convenience for those of skill in the art and is not an admission that a deposit is required under 35 U.S.C. §112.

[0759] FIG. 55 depicts a hydropathy plot of human TANGO 201. The dashed vertical line separates the signal sequence (amino acids 1-33) on the left from the mature protein (amino acids 34-403) on the right.

[0760] Tissue Distribution of TANGO 201 mRNA

[0761] Tissue distribution of TANGO 201 mRNA was determined by Northern blot hybridization performed under standard conditions and washed under stringent conditions, i.e., 0.2×SSS at 65° C. RNA from various human tissues were as provided in Multiple Tissue Northern Blots (MTN Blots, Clontech Laboratories, Inc., Palo Alto Calif.). The results indicated that human TANGO 201 mRNA is expressed in multiple human tissues, including pancreas, testis, adrenal medulla, adrenal cortex, kidney, liver, thyroid, brain, skeletal muscle, placenta, heart, lung, and stomach. The detection of TANGO 201 mRNA in a wide range of human normal tissues suggests that TANGO 201 has an essential cellular function. Two transcripts were observed of approximately 2.0 and 2.5 kb, consistent with the suggestion of alternative splicing raised by the sequence alignment. Furthermore, the ratios of these two forms differs among the tissues. For example, the 2.0 kb transcript predominates in adrenal medulla whereas the 2.5 kb form predominates in thyroid. This suggests tissue specific expression of spliced forms of human TANGO 201.

[0762] In situ tissue screening was performed on mouse adult and embryonic tissue to analyze the expression of mouse TANGO 201 mRNA. Expression in the adult mouse was not detected in any tissues tested.

[0763] Similarities Between Mouse and HUMAN TANGO 201 and to Other Sequences

[0764] An alignment of the nucleotide sequences of mouse TANGO 201 (nucleotides 1-1758 of SEQ ID NO: 43) and human TANGO 201 (nucleotides 101-1660 of SEQ ID NO: 45) using the program GAP (Needleman and Wunsch (1970) J. Mol. Biol. 48:443-453) in GCG (Wisconsin Package Version 9.1, Genetics Computer Group, Madison Wis.) with a score matrix of nwsgapdna, a gap penalty 50, and a gap extension penalty 3 resulted in an identity of 84.8%. The mouse sequence differs from the human sequence by the presence of two inserted sequences. The first is a 162 base insertion from nucleotide 938 to 1100 and the second is 78 bases from nucleotide 1286 to 1363 of SEQ ID NO: 43. This alignment is shown in FIGS. 56A-56D.

[0765] The amino acid sequences of mouse TANGO 201 (amino acids 1-483; SEQ ID NO: 44) and human TANGO 201 (amino acids 1-403; SEQ ID NO: 46) were aligned and analyzed using the program GAP (Needleman and Wunsch (1970) J. Mol. Biol. 48:443-453) in GCG (Wisconsin Package Version 9.1, Genetics Computer Group, Madison Wis.). An identity of 97% was seen in which the program settings were a score matrix of blosum 62, a gap penalty 12, and a gap extension penalty 4. The mouse sequence differs from the human sequence by the presence of two inserted sequences. The first is a 54 residue insertion from amino acid 294 to 347 and the second is 26 residues from amino acid 410 to 435. This alignment is shown in FIG. 57.

[0766] In one embodiment, the invention contemplates alternative splicing of the mRNA encoding a TANGO 201 protein. For example, one embodiment of the invention includes a human TANGO 201 nucleotide sequence further comprising exons which encode for a polypeptide sequence which is similar to the mouse TANGO 201 polypeptide sequence between amino acids 294 to 247 and 410 to 435, in the same relative position of the polypeptide of SEQ ID NO: 44. Further, the invention also features splicing of the mouse TANGO 201, that is, mouse TANGO 201 is alternatively spliced so that the mRNA encoding the polypeptide has deletions corresponding to amino acids 294 to 247 and 410 to 435 of SEQ ID NO: 44.

[0767] Mouse and human TANGO 201 show homology to OS-9, a putative secreted human protein believed to be involved in cell growth (Su, et al., (1966) Mol. Carcinogenesis 15:270-275; Kimura, et al, (1998) J. Biochem. 123:876-882). FIG. 58 depicts an alignment of a portion of mouse TANGO 201 amino acid sequence (amino acids 78 to 264 of SEQ ID NO: 44) and a portion of human TANGO 201 amino acid sequence (amino acids 78 to 264 of SEQ ID NO: 46) with a portion of OS-9 (amino acids 73 to 250 of SwissProt Accession No. Q13438). The alignment reveals that the homology is restricted to the N-terminus in which a conserved cysteine-rich domain as defined below is found. The conserved cysteine residues are highlighted in boldface type.

[0768] An alignment of human or mouse TANGO 201 with the above-described portion of the OS-9 protein sequence (Q13438) reveals 39.0% identity between human TANGO 201 and OS-9, and 42.2% identity between mouse TANGO 201 and OS-9. This alignment was performed using the ALIGN alignment program with a BLOSUM62 scoring matrix, a gap length penalty of 10, and a gap penalty of 0.05.

[0769] As used herein, a cysteine-rich domain of a TANGO 201 polypeptide includes about 140-215 amino acid residues, preferably about 150-205 amino acid residues, more preferably about 155-200 amino acid residues, and most preferably about 165-190 amino acid residues. Typically, a cysteine-rich domain is found at the N-terminal half of TANGO 201 and includes a cluster of about 4-12 cysteine residues conserved in TANGO 201 protein family members, more preferably about 6-10 cysteine residues, and still more preferably about 8 cysteine residues. In addition, a cysteine-rich domain includes at least the following consensus sequence: C-Xaa(n1)-C-Xaa(n2)-C-Xaa(n3)-C-Xaa(n4)-C-Xaa(n4)-C-Xaa(n2)-C-Xaa(n4)-C, wherein C is a cysteine residue, Xaa is any amino acid, n1 is about 20-50 amino acid residues, more preferably about 25-45 amino acid residues, and more preferably 30-40 amino acid residues in length, n2 is about 2-20 amino acid residues, more preferably 5-15 amino acid residues, and more preferably 11-12 amino acid residues in length, n3 is about 40-90 amino acid residues, more preferably about 50-80 amino acid residues, and more preferably 55-75 amino acid residues in length, and n4 is about 5-25 amino acid residues, more preferably 8-20 amino acid residues, and more preferably 13-21 amino acid residues in length.

[0770] In one embodiment, a TANGO 201 family member includes a cysteine-rich domain having an amino acid sequence that is at least about 55%, preferably at least about 65%, more preferably at least about 75%, yet more preferably at least about 85%, and most preferably at least about 95% identical to amino acids 79 to 261, to amino acids 79 to 261 or to amino acids 68 to 178, which are the cysteine-rich domains of mouse and human TANGO 201, respectively.

[0771] In another embodiment, a TANGO 201 family member includes a cysteine-rich domain having an amino acid sequence that is at least about 55%, preferably at least about 65%, more preferably at least about 75%, yet more preferably at least about 85%, and most preferably at least about 95% identical to amino acids 79 to 261, includes a conserved cluster of 8 cysteine residues, and a cysteine-rich domain consensus sequence as described herein. In yet another embodiment, a TANGO 201 family member includes a cysteine-rich domain having an amino acid sequence that is at least 55%, preferably at least about 65%, more preferably at least about 75%, yet more preferably at least about 85%, and most preferably at least about 95% identical to amino acids 79 to 261 of SEQ ID NO: 44 or SEQ ID NO: 46, includes a conserved cluster of 8 cysteine residues, a cysteine-rich consensus sequence as described herein, and has at least one TANGO 201 biological activity as described herein.

[0772] In a preferred embodiment, a TANGO 201 family member has the amino acid sequence wherein the cluster of conserved cysteine residues is located within amino acid residues 79 to 261 (at positions 79, 113, 126, 199, 215, 232, 244, and 261 of SEQ ID NO: 44 or SEQ ID NO: 46), and the cysteine-rich domain consensus sequence is located at amino acid residues 79 to 261.

[0773] Uses of TANGO 201 Nucleic Acids, Polypeptides, and Modulators Thereof

[0774] TANGO 201 polypeptides, nucleic acids, and modulators thereof, can be used to modulate the function, morphology, proliferation and/or differentiation of cells in the tissues in which it is expressed. Such molecules can be used to treat disorders associated with abnormal or aberrant metabolism or function of cells in the tissues in which it is expressed. Tissues in which TANGO 201 is expressed include, for example, pancreas, adrenal medulla, adrenal cortex, kidney, thyroid, testis, stomach, heart, brain, liver, placenta, lung, skeletal muscle, or small intestine.

[0775] For example, such molecules can be used to treat proliferative disorders, i.e., neoplasms or tumors (e.g., a carcinoma, a sarcoma, adenoma, or myeloid leukemia).

[0776] In another example, TANGO 201 polypeptides, nucleic acids, or modulators thereof, can be used to treat pancreatic disorders, such as pancreatitis (e.g. acute hemorrhagic pancreatitis and chronic pancreatitis), pancreatic cysts (e.g., congenital cysts, pseudocysts, and benign or malignant neoplastic cysts), pancreatic tumors (e.g., pancreatic carcinoma and adenoma), diabetes mellitus (e.g., insulin- and non-insulin-dependent types, impaired glucose tolerance, and gestational diabetes), or islet cell tumors (e.g., insulinomas, adenomas, Zollinger-Ellison syndrome, glucagonomas, and somatostatinoma).

[0777] In another example, TANGO 201 polypeptides, nucleic acids, or modulators thereof, can be used to treat disorders of the adrenal cortex, such as hypoadrenalism (e.g., primary chronic or acute adrenocortical insufficiency, and secondary adrenocortical insufficiency), hyperadrenalism (Cushing's syndrome, primary hyperaldosteronism, adrenal virilism, and adrenal hyperplasia), or neoplasia (e.g., adrenal adenoma and cortical carcinoma).

[0778] In another example, TANGO 201 polypeptides, nucleic acids, or modulators thereof, can be used to treat disorders of the adrenal medulla, such as neoplasms (e.g., pheochromocytomas, neuroblastomas, and ganglioneuromas).

[0779] In another example, TANGO 201 polypeptides, nucleic acids, or modulators thereof, can be used to treat disorders of the thyroid gland, such as hyperthyroidism (e.g., diffuse toxic hyperplasia, toxic multinodular goiter, toxic adenoma, and acute or subacute thyroiditis), hypothyroidism (e.g., cretinism and myxedema), thyroiditis (e.g. Hashimoto's thyroiditis, subacute granulomatous thyroiditis, subacute lymphocytic thyroiditis, Riedel's thryroiditis), Graves' disease, goiter (e.g., simple diffuse goiter and multinodular goiter), or tumors (e.g., adenoma, papillary carcinoma, follicular carcinoma, medullary carcinoma, undifferentiated malignant carcinoma, Hodgkin's disease, and non-Hodgkin's lymphoma).

[0780] In another example, TANGO 201 polypeptides, nucleic acids, or modulators thereof, can be used to treat gastric disorders, such as congenital anamolies (e.g., diaphragmatic hernias, pyloric stenosis, gastric diverticula, and gastric dilatation), gastritis (e.g., acute mucosal inflammation, chronic fundal gastritis, chronic antral gastritis, hypertrophic gastritis, granulomatous gastritis, eosinophilic gastritis), ulcerations (e.g., peptic ulcers, gastric ulcers, and duodenal ulcers), or tumors (e.g., benign polyps, malignant carcinoma, argentaffinomas, carcinoids, gastrointestinal lymphomas, carcomas, and metastatic carcinoma).

[0781] In another example, TANGO 201 polypeptides, nucleic acids, or modulators thereof, can be used to treat placental disorders, such as toxemia of pregnancy (e.g., preeclampsia and eclampsia), placentitis, or spontaneous abortion.

[0782] In another example, TANGO 201 polypeptides, nucleic acids, or modulators thereof, can be used to treat pulmonary disorders, such as atelectasis, pulmonary congestion or edema, chronic obstructive airway disease (e.g., emphysema, chronic bronchitis, bronchial asthma, and bronchiectasis), diffuse interstitial diseases (e.g., sarcoidosis, pneumoconiosis, hypersensitivity pneumonitis, Goodpasture's syndrome, idiopathic pulmonary hemosiderosis, pulmonary alveolar proteinosis, desquamative interstitial pneumonitis, chronic interstitial pneumonia, fibrosing alveolitis, hamman-rich syndrome, pulmonary eosinophilia, diffuse interstitial fibrosis, Wegener's granulomatosis, lymphomatoid granulomatosis, and lipid pneumonia), or tumors (e.g., bronchogenic carcinoma, bronchio-alveolar carcinoma, bronchial carcinoid, and mesenchymal tumors).

[0783] In another example, TANGO 201 polypeptides, nucleic acids, or modulators thereof, can be used to treat disorders of skeletal muscle, such as muscular dystrophy (e.g., Duchenne muscular dystrophy, Becker Muscular Dystrophy, Emery-Dreifuss muscular dystrophy, Limb-Girdle muscular dystrophy, Facioscapulohumeral muscular dystrophy, myotonic dystrophy, oculopharyngeal muscular dystrophy, distal muscular dystrophy, and congenital muscular dystrophy), motor neuron diseases (e.g. amyotrophic lateral sclerosis, infantile progressive spinal muscular atrophy, intermediate spinal muscular atrophy, spinal bulbar muscular atrophy, and adult spinal muscular atrophy), myopathies (e.g., inflammatory myopathies (e.g., dermatomyositis and polymyositis), myotonia congenita, paramyotonia congenita, central core disease, nemaline myopathy, myotubular myopathy, and periodic paralysis), and metabolic diseases of muscle (e.g., phosphorylase deficiency, acid maltase deficiency, phosphofructokinase deficiency, Debrancher enzyme deficiency, mitochondrial myopathy, carnitine deficiency, carnitine palmityl transferase deficiency, phosphoglycerate kinase deficiency, phosphoglycerate mutase deficiency, lactate dehydrogenase deficiency, and myoadenylate deaminase deficiency).

[0784] In another example, TANGO 201 polypeptides, nucleic acids, or modulators thereof, can be used to treat cardiovascular disorders, such as ischemic heart disease (e.g., angina pectoris, myocardial infarction, and chronic ischemic heart disease), hypertensive heart disease, pulmonary heart disease, valvular heart disease (e.g., rheumatic fever and rheumatic heart disease, endocarditis, mitral valve prolapse, and aortic valve stenosis), congenital heart disease (e.g., valvular and vascular obstructive lesions, atrial or ventricular septal defect, and patent ductus arteriosus), or myocardial disease (e.g., myocarditis, congestive cardiomyopathy, and hypertrophic cariomyopathy).

[0785] In another example, TANGO 201 polypeptides, nucleic acids, or modulators thereof, can be used to treat disorders of the brain, such as cerebral edema, hydrocephalus, brain herniations, iatrogenic disease (due to, e.g., infection, toxins, or drugs), inflammations (e.g., bacterial and viral meningitis, encephalitis, and cerebral toxoplasmosis), cerebrovascular diseases (e.g., hypoxia, ischemia, and infarction, intracranial hemorrhage and vascular malformations, and hypertensive encephalopathy), and tumors (e.g., neuroglial tumors, neuronal tumors, tumors of pineal cells, meningeal tumors, primary and secondary lymphomas, intracranial tumors, and medulloblastoma), and to treat injury or trauma to the brain.

[0786] In another example, TANGO 201 polypeptides, nucleic acids, or modulators thereof, can be used to treat hepatic disorders, such as jaundice, hepatic failure, hereditary hyperbiliruinemias (e.g., Gilbert's syndrome, Crigler-Naijar syndromes and Dubin-Johnson and Rotor's syndromes), hepatic circulatory disorders (e.g., hepatic vein thrombosis and portal vein obstruction and thrombosis) hepatitis (e.g., chronic active hepatitis, acute viral hepatitis, and toxic and drug-induced hepatitis) cirrhosis (e.g., alcoholic cirrhosis, biliary cirrhosis, and hemochromatosis), or malignant tumors (e.g., primary carcinoma, hepatoblastoma, and angiosarcoma).

[0787] In another example, TANGO 201 polypeptides, nucleic acids, or modulators thereof, can be used to treat renal disorders, such as glomerular diseases (e.g., acute and chronic glomerulonephritis, rapidly progressive glomerulonephritis, nephrotic syndrome, focal proliferative glomerulonephritis, glomerular lesions associated with systemic disease, such as systemic lupus erythematosus, Goodpasture's syndrome, multiple myeloma, diabetes, neoplasia, sickle cell disease, and chronic inflammatory diseases), tubular diseases (e.g., acute tubular necrosis and acute renal failure, polycystic renal diseasemedullary sponge kidney, medullary cystic disease, nephrogenic diabetes, and renal tubular acidosis), tubulointerstitial diseases (e.g., pyelonephritis, drug and toxin induced tubulointerstitial nephritis, hypercalcemic nephropathy, and hypokalemic nephropathy) acute and rapidly progressive renal failure, chronic renal failure, nephrolithiasis, vascular diseases (e.g., hypertension and nephrosclerosis, microangiopathic hemolytic anemia, atheroembolic renal disease, diffuse cortical necrosis, and renal infarcts), or tumors (e.g., renal cell carcinoma and nephroblastoma).

[0788] In another example, TANGO 201 polypeptides, nucleic acids, or modulators thereof, can be used to treat testicular disorders, such as unilateral testicular enlargement (e.g., nontuberculous, granulomatous orchitis), inflammatory diseases resulting in testicular dysfunction (e.g., gonorrhea and mumps), and tumors (e.g., germ cell tumors, interstitial cell tumors, androblastoma, testicular lymphoma and adenomatoid tumors).

[0789] In another example, TANGO 201 polypeptides, nucleic acids, or modulators thereof, can be used to treat intestinal disorders, such as ischemic bowel disease, infective enterocolitis, Crohn's disease, benign tumors, malignant tumors (e.g., argentaffinomas, lymphomas, adenocarcinomas, and sarcomas), malabsorption syndromes (e.g., celiac disease, tropical sprue, Whipple's disease, and abetalipoproteinemia), obstructive lesions, hernias, intestinal adhesions, intussusception, or volvulus.

[0790] Human TANGO 223

[0791] A clone, Athua075b02, encoding full-length human TANGO 223 was identified by use of a partial clone encoding a signal peptide and obtained by use of a yeast signal trap method. This methodology, described, for example, in W099/24616 dated May 20, 1999, takes advantage of the fact that molecules such as TANGO 223 have an amino terminal signal sequence that directs certain secreted and membrane-bound proteins through the cellular secretory apparatus.

[0792] Briefly, a cDNA library from human fetal kidney was prepared in pBOSS1 and transformed into the yeast strain Yscreen2 as described in W099/24616. cDNA inserts of plasmids rescued from the resulting yeast colonies after selection on glucose were sequenced. The initial signal trap clone obtained, ZmhKy398, was shown to encode a 29 amino acid signal peptide, followed by a 13 amino acid open reading frame. This clone was then fused to a yeast KRE9 gene lacking a functional signal sequence and used to search proprietary databases for a full length clone.

[0793] A clone representing an extension of the initial signal sequence positive clone was identified in a human fetal lung library. The cDNA of this clone is 1473 nucleotides long (FIGS. 59A-59B; SEQ ID NO: 47). The open reading frame of this cDNA, nucleotides 30 to 770, encodes a 247 amino acid protein (SEQ ID NO: 48).

[0794] TANGO 223 is predicted to be a transmembrane protein having a 186 amino acid extracellular domain (amino acids 30-215 of SEQ ID NO: 48), a single 23 amino acid transmembrane domain (amino acids 216-238 of SEQ ID NO: 48), and a nine amino acid cytoplasmic domain (amino acids 239-247 of SEQ ID NO: 48). Alternatively, in another embodiment, the TANGO 223 protein contains an extracellular domain at amino acid residues 239 to 247 of SEQ ID NO: 48, a transmembrane domain at amino acid residues 216 to 238, and a cytoplasmic domain at amino acid residues 30 to 215. In addition, there are 15 cysteines in the extracellular domain at positions 68, 74, 81, 84, 90, 100, 108, 125, 128, 138, 144, 149, 158, 166, and 178 and two in the signal peptide sequence at positions 15 and 25 of SEQ ID NO: 48.

[0795] The signal peptide prediction program SIGNALP (Nielsen et al. (1997) Protein Engineering 10:1-6) predicted that TANGO 223 includes a 29 amino acid signal peptide (amino acid 1 to about amino acid 29 of SEQ ID NO: 48) preceding the mature TANGO 223 protein (corresponding to about amino acid 30 to amino acid 247 of SEQ ID NO: 48). Human TANGO 223 is predicted to have a molecular weight of 27.2 kDa prior to cleavage of its signal peptide and a molecular weight of 24 kDa subsequent to cleavage of its signal peptide. The presence of a methionine residue at positions 66, 123, 145, and 175 indicate that there can be alternative forms of TANGO 223 of 182 amino acids, 125 amino acids, 103 amino acids, and 73 amino acids, respectively.

[0796] In another embodiment, a human TANGO 223 protein (SEQ ID NO: 48) contains a signal sequence of about amino acids 1-29 of SEQ ID NO: 48. The signal sequence is cleaved during processing of the mature protein.

[0797] In another example, a TANGO 223 family member also includes one or more of the following domains: (1) an extracellular domain; (2) a transmembrane domain; and (3) a cytoplasmic domain. Thus, in one embodiment, a TANGO 223 protein contains an extracellular domain of about amino acids 30-215 of SEQ ID NO: 48. In another embodiment, a TANGO 223 protein contains a transmembrane domain of about amino acids 216-238 of SEQ ID NO: 48. In another embodiment, a TANGO 223 protein contains a cytoplasmic domain of about amino acids 239-247 of SEQ ID NO: 48. Alternatively, in another embodiment, a TANGO 223 protein contains an extracellular domain at amino acid residues 239 to 247, a transmembrane domain at amino acid residues 216 to 238, and a cytoplasmic domain at amino acid residues 30 to 215 of SEQ ID NO: 48.

[0798] In another embodiment, a TANGO 223 protein contains a 169 amino acid extracellular domain (amino acids 30-198 of SEQ ID NO: 48), a single 23 amino acid transmembrane domain (amino acids 199-221 of SEQ ID NO: 48), and a nine amino acid cytoplasmic domain (amino acids 222-230 of SEQ ID NO: 48). Alternatively, in another embodiment, the TANGO 223 protein contains an extracellular domain at amino acid residues 222 to 230, a transmembrane domain at amino acid residues 199 to 221, and a cytoplasmic domain at amino acid residues 30 to 198 of SEQ ID NO: 48.

[0799] In certain embodiments, a TANGO 223 family member has the amino acid sequence, and the signal sequence is located at amino acids 1 to 27, 1 to 28, 1 to 29, 1 to 30 or 1 to 31. In such embodiments of the invention, the domains and the mature protein resulting from cleavage of such signal peptides are also included herein. For example, the cleavage of a signal sequence consisting of amino acids 1 to 29 results in a mature TANGO 223 protein corresponding to amino acids 30 to 247. The signal peptide sequence is normally cleaved during processing of the mature protein.

[0800] In one embodiment of a nucleotide sequence of human TANGO 223, the nucleotide at position 98 is guanine (G). In this embodiment, the amino acid at position 57 is a glutamate (E). In another embodiment of a nucleotide sequence of human TANGO 223, the nucleotide at position 98 is a thymidine (T). In this embodiment, the amino acid at position 57 is stop codon resulting in a truncated protein of 57 amino acids length In another embodiment of a nucleotide sequence of human TANGO 223, the nucleotide at position 98 is a cytosine (C). In this embodiment, the amino acid at position 57 is glutamine (Q) In another embodiment of a nucleotide sequence of human TANGO 223, the nucleotide at position 98 is adenine (A). In this embodiment, the amino acid at position 57 is a lysine (K).

[0801] An N-glycosylation (N-GCL) site having the sequence NFSC is found from amino acids 87 to 90. A second N-GCL site having the sequence NMTC is found from amino acids 122 to 125. A third N-GCL site having the sequence NSTS is found from amino acids 140 to 143. A fourth N-GCL site having the sequence NCTV is found from amino acids 157 to 160. A fifth N-GCL site having the sequence NRTF is found from amino acids 169 to 172. A sixth N-GCL site having the sequence NWTG is found from amino acids 179 to 182. A protein kinase C (PKC) phosphorylation site having the sequence SIK is found from amino acids 39 to 41. A second PKC phosphorylation site having the sequence SQK is found from amino acids 115 to 117. A third PKC phosphorylation site having the sequence TCR is found from amino acids 124 to 126. A fourth PKC phosphorylation site having the sequence TVR is found from amino acids 159 to 161. A casein kinase II (CKII) phosphorylation site having the sequence SGGE is found from amino acids 28 to 31. A second CKII phosphorylation site having the sequence SIKD is found from amino acids 39 to 42. A third CKII phosphorylation site having the sequence TCVD is found from amino acids 107 to 110. A fourth CKII phosphorylation site having the sequence TYDE is found from amino acids 134 to 137. A fifth CKII phosphorylation site having the sequence TVRD is found from amino acids 159 to 162. A sixth CKII phosphorylation site having the sequence TLID is found from amino acids 226 to 229. An N-myristoylation site having the sequence GGEQSQ is found from amino acids 29 to 34. A second N-myristoylation site having the sequence GGFGAD is found from amino acids 197 to 202.

[0802] FIG. 60 depicts a hydropathy plot of TANGO 223. The dashed vertical line separates the signal sequence (amino acids 1-29 of SEQ ID NO: 48) on the left from the mature protein (amino acids 30-247 of SEQ ID NO: 48) on the right.

[0803] The human TANGO 223 gene was mapped on radiation hybrid panels to chromosome 15, in the region q26. Flanking markers for this region are WI-3162 and WI-4919. The OTS (otosclerosis) locus also maps to this region of the human chromosome. The ALDH6 (aldehyde dehydrogenase 6), CHRM5 (cholinergic receptor), STX (sialyltransferase X), and IDDM3 (insulin-dependent diabetes mellitus 3) genes also map to this region of the human chromosome. This region is syntenic to mouse chromosome 7. The tp (taupe) locus also maps to this region of the mouse chromosome. The agc (shhtrvsn), hf (hepatic fusion), sur (sulfonylurea receptor), and fah (fumarylacetoacetate hyrdrolase) genes also map to this region of the mouse chromosome.

[0804] Clone Athua075b02, which encodes TANGO 223, was deposited as a composite deposit with the American Type Culture Collection (10801 University Boulevard, Manassas, Va. 20110-2209) on Jan. 22, 1999 and assigned Accession Number 207081. This deposit will be maintained under the terms of the Budapest Treaty on the International Recognition of the Deposit of Microorganisms for the Purposes of Patent Procedure. This deposit was made merely as a convenience for those of skill in the art and is not an admission that a deposit is required under 35 U.S.C. §112.

[0805] Mouse TANGO 223

[0806] A mouse TANGO 223 clone, Aompa001h06, was identified using the cDNA of the human TANGO 223 as a probe in a screen of a mouse pancreatic library. Mouse TANGO 223 is 854 nucleotides long (FIGS. 62A-62B; SEQ ID NO: 49). The open reading frame of this cDNA (nucleotides 5 to 694 of SEQ ID NO: 49) encodes a 230 amino acid protein (SEQ ID NO: 50).

[0807] The signal peptide prediction program SIGNALP (Nielsen et al. (1997) Protein Engineering 10:1-6) predicted that TANGO 223 includes a 29 amino acid signal peptide (amino acid 1 to about amino acid 29 of SEQ ID NO: 50) preceding the mature TANGO 223 protein (corresponding to about amino acid 30 to amino acid 230 of SEQ ID NO: 50). Mouse TANGO 223 is predicted to have a molecular weight of 25.6 kDa prior to cleavage of its signal peptide and a molecular weight of 22.4 kDa subsequent to cleavage of its signal peptide. The presence of a methionine residue at positions 48, 106 and 128 indicate that there can be alternative forms of TANGO 223 of 183 amino acids, 125 amino acids and 103 amino acids of SEQ ID NO: 50, respectively.

[0808] In certain embodiments, a TANGO 223 family member has the amino acid sequence, and the signal sequence is located at amino acids 1 to 27, 1 to 28, 1 to 29, 1 to 30 or 1 to 31. In such embodiments of the invention, the domains and the mature protein resulting from cleavage of such signal peptides are also included herein. For example, the cleavage of a signal sequence consisting of amino acids 1 to 29 results in a mature TANGO 223 protein corresponding to amino acids 30 to 247. The signal peptide sequence is normally cleaved during processing of the mature protein.

[0809] TANGO 223 is predicted to be a transmembrane protein having a 169 amino acid extracellular domain (amino acids 30-198), a single 23 amino acid transmembrane domain (amino acids 199-221 of SEQ ID NO: 50), and a nine amino acid cytoplasmic domain (amino acids 222-230 of SEQ ID NO: 50). Alternatively, in another embodiment, the TANGO 223 protein contains an extracellular domain at amino acid residues 222 to 230, a transmembrane domain at amino acid residues 199 to 221, and a cytoplasmic domain at amino acid residues 30 to 198 of SEQ ID NO: 50. There are 14 cysteines in the extracellular domain atpositions 51, 64, 67, 73, 83, 91, 108, 111, 121, 127, 132, 141, 149 and 161 and one in the signal peptide sequence at position 24 of SEQ ID NO: 50.

[0810] An N-glycosylation (N-GCL) site having the sequence NVSC is found in TANGO 223 from amino acids 70 to 73. A second N-GCL site having the sequence NMTC is found from amino acids 105 to 108. A third N-GCL site having the sequence NSTT is found from amino acids 123 to 126. A fourth N-GCL site having the sequence NCTV is found from amino acids 140 to 143. A fifth N-GCL site having the sequence NRTF is found from amino acids 152 to 155. A sixth N-GCL site having the sequence NWTG is found from amino acids 162 to 165.

[0811] A protein kinase C (PKC) phosphorylation site having the sequence SVR is found from amino acids 10 to 12. A second PKC phosphorylation site having the sequence TVK is found from amino acids 84 to 86. A third PKC phosphorylation site having the sequence TCR is found from amino acids 107 to 109. A fourth PKC phosphorylation site having the sequence TVR is found from amino acids 142 to 144.

[0812] A casein kinase II (CKII) phosphorylation site having the sequence SGDE is found from amino acids 28 to 31. A second CKII phosphorylation site having the sequence TCVD is found from amino acids 90 to 93. A third CKII phosphorylation site having the sequence TDYE is found from amino acids 117 to 120. A fourth CKII phosphorylation site having the sequence TVRD is found from amino acids 142 to 145. A fifth CKII phosphorylation site having the sequence TLID is found from amino acids 209 to 212.

[0813] An N-myristoylation site having the sequence GGFGAD is found from amino acids 180 to 185.

[0814] Tissue Distribution of TANGO 223 mRNA

[0815] Tissue distribution of TANGO 223 mRNA was determined by Northern blot hybridization performed under standard conditions and washed under stringent conditions, i.e., 0.2×SSS at 65° C. RNA from various human and mouse tissues were as provided in Multiple Tissue Northern Blots (MTN Blots, Clontech Laboratories, Inc., Palo Alto, Calif.).

[0816] TANGO 223 is expressed in multiple human tissues and hybridizes to nucleic acids in mouse tissues, including heart, brain, liver, kidney, testis, prostate, ovary, small intestine, colon, and peripheral blood leukocytes. TANGO 223 mRNA has highest expression in adult brain and the submandibular gland. Expression was also observed in the testes in a pattern that outlined the seminiferous vesicles. A single transcript of approximately 1 kb was detected in these tissues. The detection of TANGO 223 mRNA in a wide range of normal tissues suggests that TANGO 223 has an essential cellular function. Embryonic mouse tissues also had a ubiquitous signal.

[0817] In situ tissue screening was performed on mouse adult and embryonic tissue to analyze the expression of TANGO 223 mRNA.

[0818] In the case of adult expression, the following results were obtained: For the testis, a signal outlining some seminiferous tubules was detected. In the placenta, a signal was very weak. In the ovaries, a very weak signal was detected. A weak signal was detected from the adrenal gland. A moderate, ubiquitous signal was detected in the submandibular gland. A moderate signal was detected in the brain. A weak signal was detected in the spinal cord. A weak signal was detected in the lymph node. and a moderate signal was observed in the stomach. No signal was detected in the following tissues: eye and harderian gland, white and brown fat, heart, lung, liver, kidney, colon, small intestine, thymus, spleen, pancreas, skeletal muscle, and bladder.

[0819] Embryonic expression was seen in a number of tissues. The highest expressing tissue was the brain and spinal cord which was seen at E13.5 and continues to P1.5. At E15.5, the strongest signal observed was in the brain, spinal cord, lung and kidney. At 35 E16.5, the signal was the same as in E15.5. At E18.5, the signal is highest in the brain, spinal cord, eye and submaxillary gland and kidney. At P1.5, the signal pattern is identical to E18.5.

[0820] Similarity of TANGO 223 to Other Polypeptides

[0821] The orientation of the N-terminus toward the extracellular domain indicates TANGO 223 as being a type I transmembrane protein. A BLASTp search (version 1.4.10 MP-WashU, Altschul, et al., (1990) J. Mol. Biol. 215:403-410) of the amino acid sequence of TANGO 223 revealed similarity to two Caenorhabditis elegans proteins. One protein, Swiss-Prot accession number 001975 and gene name C41D11.5, is a putative 85.1 kDa nuclease belonging to the family of DNA/RNA nonspecific endonucleases. However, the domain characteristic of this family of proteins is not seen in TANGO 223. Another protein, Swiss-Prot accession number P34280 and gene name C02F5.3, is a putative 64.3 kd GTP-binding protein in chromosome III belonging to the GTP1/OBG family.

[0822] TANGO 223 contains a cysteine-rich domain in which multiple N-glycosylation sites are also present. A homologous cysteine-rich domain is found in the polypeptide sequence of SwissProt 001975. FIG. 61 depicts an alignment of a portion of human TANGO 223 amino acid sequence (amino acids 83 to 178 of SEQ ID NO: 48) with amino acids 258 to 376 of SwissProt 001975. The conserved cysteine residues are highlighted in boldface type. A double dot between two residues indicates a complete identity, and a single dot indicates a conservative substitution.

[0823] Human TANGO 223 aligned with SwissProt 001975 reveals a sequence identity of 37.5% over a portion polypeptides corresponding to amino acids 82 to 180. This alignment was performed using the ALIGN alignment program with a BLOSUM62 scoring matrix, a gap length penalty of 10, and a gap penalty of 0.05.

[0824] As used herein, a cysteine-rich domain of a TANGO 223 polypeptide includes about 60-140 amino acid residues, preferably about 70-130 amino acid residues, more preferably about 80-120 amino acid residues, and most preferably about 95-105 amino acid residues of SEQ ID NO: 48. Typically, a cysteine-rich domain includes a cluster of about 5-25 cysteine residues conserved in TANGO 223 protein family members, more preferably about 10-18 cysteine residues, and still more preferably about 15 cysteine residues. In addition, a cysteine-rich domain includes at least the following consensus sequence: C-Xaa(n1)-C-Xaa(n1)-C-Xaa(n4)-C-Xaa(n1)-C-Xaa(n1)-C-Xaa(n2)-C-Xaa(n1)-C-Xaa(n3)-C-Xaa(n4)-C-Xaa(n2)-C-Xaa(n1)-C-Xaa(n3)-C-Xaa(n1)-C-Xaa(n3)-C, wherein C is a cysteine residue, Xaa is any amino acid, n1 is about 2-12 amino acid residues, more preferably about 3-10 amino acid residues, and more preferably 4-8 amino acid residues in length, n2 is about 5-15 amino acid residues, more preferably 7-12 amino acid residues, and more preferably 9-10 amino acid residues in length, n3 is about 6-22 amino acid residues, more preferably about 8-20 amino acid residues, and more preferably 10-17 amino acid residues in length, and n4 is about 1-7 amino acid residues, more preferably 1-5 amino acid residues, and more preferably 2-3 amino acid residues in length. In one embodiment, a TANGO 223 family member includes a cysteine-rich domain having an amino acid sequence that is at least about 55%, preferably at least about 65%, more preferably at least about 75%, yet more preferably at least about 85%, and most preferably at least about 95% identical to amino acids 68 to 178, which is the cysteine-rich domain of TANGO 223. In another embodiment, a TANGO 223 family member includes a cysteine-rich domain having an amino acid sequence that is at least about 55%, preferably at least about 65%, more preferably at least about 75%, yet more preferably at least about 85%, and most preferably at least about 95% identical to amino acids 68 to 178, includes a conserved cluster of 15 cysteine residues, and a cysteine-rich domain consensus sequence as described herein. In yet another embodiment, a TANGO 223 family member includes a cysteine-rich domain having an amino acid sequence that is at least 55%, preferably at least about 65%, more preferably at least about 75%, yet more preferably at least about 85%, and most preferably at least about 95% identical to amino acids 68 to 178, includes a conserved cluster of 15 cysteine residues, a cysteine-rich consensus sequence as described herein, and has at least one TANGO 223 biological activity as described herein.

[0825] In a preferred embodiment, a TANGO 223 family member has the amino acid sequence wherein the cluster of conserved cysteine residues is located within amino acid residues 68 to 178 (at positions 68,74, 81, 84, 90, 100, 108, 125, 128, 138, 144, 149, 158, 166, and 178), and the cysteine-rich domain consensus sequence is located at amino acid residue 68 to amino acid residue 178 of SEQ ID NO: 48.

[0826] Uses of TANGO 223 Nucleic Acids, Polypeptides and Modulators Thereof

[0827] TANGO 223 polypeptides, nucleic acids, and modulators thereof, can be used to modulate the function, morphology, proliferation and/or differentiation of cells in the tissues in which it is expressed. Such molecules can be used to treat disorders associated with abnormal or aberrant metabolism or function of cells in the tissues in which it is expressed. Tissues in which TANGO 223 is expressed include, for example, heart, brain, liver, kidney, testis, prostate, ovary, small intestine, colon, and peripheral blood leukocytes.

[0828] In one example, TANGO 223 polypeptides, nucleic acids, or modulators thereof, can be used to treat cardiovascular disorders, such as ischemic heart disease (e.g., angina pectoris, myocardial infarction, and chronic ischemic heart disease), hypertensive heart disease, pulmonary heart disease, valvular heart disease (e.g., rheumatic fever and rheumatic heart disease, endocarditis, mitral valve prolapse, and aortic valve stenosis), congenital heart disease (e.g., valvular and vascular obstructive lesions, atrial or ventricular septal defect, and patent ductus arteriosus), or myocardial disease (e.g., myocarditis, congestive cardiomyopathy, and hypertrophic cariomyopathy).

[0829] In another example, TANGO 223 polypeptides, nucleic acids, or modulators thereof, can be used to treat disorders of the brain, such as cerebral edema, hydrocephalus, brain herniations, iatrogenic disease (due to, e.g., infection, toxins, or drugs), inflammations (e.g., bacterial and viral meningitis, encephalitis, and cerebral toxoplasmosis), cerebrovascular diseases (e.g., hypoxia, ischemia, and infarction, intracranial hemorrhage and vascular malformations, and hypertensive encephalopathy), and tumors (e.g., neuroglial tumors, neuronal tumors, tumors of pineal cells, meningeal tumors, primary and secondary lymphomas, intracranial tumors, and medulloblastoma), and to treat injury or trauma to the brain.

[0830] In another example, TANGO 223 polypeptides, nucleic acids, or modulators thereof, can be used to treat hepatic disorders, such as jaundice, hepatic failure, hereditary hyperbiliruinemias (e.g., Gilbert's syndrome, Crigler-Naijar syndromes and Dubin-Johnson and Rotor's syndromes), hepatic circulatory disorders (e.g., hepatic vein thrombosis and portal vein obstruction and thrombosis) hepatitis (e.g., chronic active hepatitis, acute viral hepatitis, and toxic and drug-induced hepatitis) cirrhosis (e.g., alcoholic cirrhosis, biliary cirrhosis, and hemochromatosis), or malignant tumors (e.g., primary carcinoma, hepatoblastoma, and angiosarcoma).

[0831] In another example, TANGO 223 polypeptides, nucleic acids, or modulators thereof, can be used to treat renal disorders, such as glomerular diseases (e.g., acute and chronic glomerulonephritis, rapidly progressive glomerulonephritis, nephrotic syndrome, focal proliferative glomerulonephritis, glomerular lesions associated with systemic disease, such as systemic lupus erythematosus, Goodpasture's syndrome, multiple myeloma, diabetes, neoplasia, sickle cell disease, and chronic inflammatory diseases), tubular diseases (e.g., acute tubular necrosis and acute renal failure, polycystic renal diseasemedullary sponge kidney, medullary cystic disease, nephrogenic diabetes, and renal tubular acidosis), tubulointerstitial diseases (e.g., pyelonephritis, drug and toxin induced tubulointerstitial nephritis, hypercalcemic nephropathy, and hypokalemic nephropathy) acute and rapidly progressive renal failure, chronic renal failure, nephrolithiasis, vascular diseases (e.g., hypertension and nephrosclerosis, microangiopathic hemolytic anemia, atheroembolic renal disease, diffuse cortical necrosis, and renal infarcts), or tumors (e.g., renal cell carcinoma and nephroblastoma).

[0832] In another example, TANGO 223 polypeptides, nucleic acids, or modulators thereof, can be used to treat testicular disorders, such as unilateral testicular enlargement (e.g., nontuberculous, granulomatous orchitis), inflammatory diseases resulting in testicular dysfunction (e.g., gonorrhea and mumps), and tumors (e.g., germ cell tumors, interstitial cell tumors, androblastoma, testicular lymphoma and adenomatoid tumors).

[0833] In another example, TANGO 223 polypeptides, nucleic acids, or modulators thereof, can be used to treat prostate disorders, such as inflammatory diseases (e.g. acute and chronic prostatitis and granulomatous prostatitis), hyperplasia (e.g., benign prostatic hypertrophy or hyperplasia), or tumors (e.g., carcinomas).

[0834] In another example, TANGO 223 polypeptides, nucleic acids, or modulators thereof, can be used to treat ovarian disorders, such as non-neoplastic cysts (e.g., follicular and luteal cysts and polycystic ovaries) and tumors (e.g., tumors of surface epithelium, germ cell tumors, sex cord-stromal tumors, and metastatic carcinomas.

[0835] In another example, TANGO 223 polypeptides, nucleic acids, or modulators thereof, can be used to treat intestinal disorders, such as ischemic bowel disease, infective enterocolitis, Crohn's disease, benign tumors, malignant tumors (e.g., argentaffinomas, lymphomas, adenocarcinomas, and sarcomas), malabsorption syndromes (e.g., celiac disease, tropical sprue, Whipple's disease, and abetalipoproteinemia), obstructive lesions, hernias, intestinal adhesions, intussusception, or volvulus.

[0836] In another example, TANGO 223 polypeptides, nucleic acids, or modulators thereof, can be used to treat colonic disorders, such as congenital anomalies (e.g., megacolon and imperforate anus), idiopathic disorders (e.g., diverticular disease and melanosis coli), vascular lesions (e.g., ischemic colistis, hemorrhoids, angiodysplasia), inflammatory diseases (e.g., idiopathic ulcerative colitis, pseudomembranous colitis, and lymphopathia venereum), tumors (e.g., hyperplastic polyps, adenomatous polyps, bronchogenic cancer, colonic carcinoma, squamous cell carcinoma, adenoacanthomas, sarcomas, lymphomas, argentaffinomas, carcinoids, and melanocarcinomas).

[0837] In another example, TANGO 223 polypeptides, nucleic acids, or modulators thereof, can be used to treat leukocytic disorders, such as leukopenias (e.g., neutropenia, monocytopenia, lymphopenia, and granulocytopenia), leukocytosis (e.g., granulocytosis, lymphocytosis, eosinophilia, monocytosis, acute and chronic lymphadenitis), malignant lymphomas (e.g., Non-Hodgkin's lymphomas, Hodgkin's lymphomas, leukemias, agnogenic myeloid metaplasia, multiple myeloma, plasmacytoma, Waldrenström's macroglobulinemia, heavy-chain disease, monoclonal gammopathy, histiocytoses, eosinophilic granuloma, and angioimmunoblastic lymphadenopathy).

[0838] Tango 216

[0839] In one aspect, the present invention is based on the discovery of cDNA molecules which encode a novel family of proteins having a von Willebrand factor (vWF) A domain, referred to herein as TANGO 216 proteins. Described herein are human TANGO 216, and mouse TANGO 216 nucleic acid molecules and the corresponding polypeptides which the nucleic acid molecules encode.

[0840] For example, the TANGO 216 proteins of the invention include a domain which bears sequence identity to a vWF A domain. Proteins having such a domain are involved in biological processes controlled by specific, often adhesive, molecular interactions. The vWF A domain mediates binding to proteins and sugars. Proteins having vWF A domains may interact through homophilic interactions between vWF A domains. Thus, included within the scope of the invention are TANGO 216 proteins having a vWF A domain. As used herein, a vWF A domain refers to an amino acid sequence of about 150 to 190, preferably about 155 to 185, 160 to 180, and more preferably about 170 amino acids in length. Conserved amino acid motifs, referred to herein as “consensus patterns” or “signature patterns”, can be used to identify TANGO 216 family members. For example, the following signature pattern can be used to identify TANGO 216 family members: D-x (2)-F-[ILV]-x-D-x-S-x (2, 3)-[ILV]-x (10, 12)-F. TANGO 216 has such a signature pattern at about amino acids 44 to 169 of SEQ ID NO: 51.

[0841] The vWF A domain consensus sequence is also available from the HMMer version 2.0 software as Accession Number PF00092. Software for HMM-based profiles is available from http://www.csc.ucsc.edu/research/compbio/sam.html and from http://genome.wustl.edu/eddy/hmmer.html. A vWF A domain of TANGO 216 extends, for example, from about amino acids 44 to 213.

[0842] Also included within the scope of the present invention are TANGO 216 proteins having a signal sequence.

[0843] In certain embodiments, a TANGO 216 family member has the amino acid sequence, and the signal sequence is located at amino acids 1 to 31, 1 to 32, 1 to 33, 1 to 34 or 1 to 35. In such embodiments of the invention, the domains and the mature protein resulting from cleavage of such signal peptides are also included herein. For example, the cleavage of a signal sequence consisting of amino acids 1 to 33 of SEQ ID NO: 52 results in a mature TANGO 216 protein corresponding to amino acids 34 to 488 of SEQ ID NO: 52. The signal sequence is normally cleaved during processing of the mature protein.

[0844] The present invention also includes TANGO 216 proteins having a transmembrane domain. An example of a transmembrane domain includes from about amino acids 318 to 345 of SEQ ID NO: 52.

[0845] In one embodiment, a TANGO 216 protein of the invention includes a vWF A domain. In another embodiment, a TANGO 216 protein of the invention includes a vWF A domain, and a signal sequence. In another embodiment, a TANGO 216 protein of the invention includes a vWF A domain, a extracellular domain, and a signal sequence. In another embodiment, a TANGO 216 protein of the invention includes a vWF A domain, and an extracellular domain. In another embodiment, a TANGO 216 protein of the invention includes a vWF A domain, an extracellular domain, and a transmembrane domain. In another embodiment, a TANGO 216 protein of the invention includes a vWF A domain, an extracellular domain, a transmembrane domain, and a cytoplasmic domain.

[0846] Human TANGO 216

[0847] The cDNA encoding human TANGO 216 was isolated by screening for cDNAs which encode a potential signal sequence. Briefly, a clone encoding TANGO 216 was isolated through high throughput screening of a prostate stroma cell library. The human TANGO 216 clone includes a 3677 nucleotide cDNA (FIGS. 63A-63C; SEQ ID NO: 51). The open reading frame of this cDNA (nucleotides 307 to 1770 of SEQ ID NO: 51), encodes a 488 amino acid transmembrane protein depicted in of SEQ ID NO: 52.

[0848] In another embodiment, a human TANGO 216 clone comprises a 4350 nucleotide cDNA. The open reading frame of this cDNA comprises nucleotides 353 to 1819, and encodes a the human TANGO 216 transmembrane protein comprising 488 amino acids.

[0849] In one embodiment of a nucleotide sequence of human TANGO 216, the nucleotide at position 318 is a guanine (G). In this embodiment, the amino acid at position 12 is glutamate (E). In another embodiment of a nucleotide sequence of human TANGO 216, the nucleotide at position 318 is a cytosine (C). In this embodiment, the amino acid at position 12 is aspartate (D). In another embodiment of a nucleotide sequence of human TANGO 216, the nucleotide at position 411 is a guanine (G). In this embodiment, the amino acid at position 35 is a glutamate (E). In another embodiment of a nucleotide sequence of human TANGO 216, the nucleotide at position 411 is a cytosine (C). In this embodiment, the amino acid at position 35 is aspartate (D). In another embodiment of a nucleotide sequence of human TANGO 216, the nucleotide at position 489 is an adenine (A). In this embodiment, the amino acid at position 61 is a glutamate (E). In another embodiment of a nucleotide sequence of human TANGO 216, the nucleotide at position 489 is a cytosine (C). In this embodiment, the amino acid at position 61 is aspartate (D).

[0850] The signal peptide prediction program SIGNALP (Nielsen et al. (1997) Protein Engineering 10:1-6) predicted that human TANGO 216 includes a 33 amino acid signal peptide (amino acids 1 to about amino acid 33 of SEQ ID NO: 52) preceding the mature TANGO 216 protein (corresponding to about amino acid 34 to amino acid 488 of SEQ ID NO: 52). The presence of a methionine residue at positions 78, 245, 277, 337, 392, and 369 indicate that there can be alternative forms of human TANGO 216 of 411 amino acids, 244 amino acids, 212 amino acids, 152 amino acids, 97 amino acids, and 120 amino acids of SEQ ID NO: 52, respectively.

[0851] In one embodiment, human TANGO 216 includes extracellular domains (about amino acids 34 to 79 and 342 to 488), transmembrane (TM) domains (amino acids 80-97 and 318 to 341 of SEQ ID NO: 52); and a cytoplasmic domain (amino acids 98 to 317 of SEQ ID NO: 52). The cytoplasmic domain is very rich in proline and glutamic acid residues. These residues represent 27% of the residues in the cytoplasmic domain of human TANGO 216.

[0852] Alternatively, in another embodiment, a human TANGO 216 protein contains an extracellular domain at amino acid residues 98 to 317, transmembrane (TM) domains (amino acids 80-97 and 318 to 341, and cytoplasmic domains at amino acid residues 1 to 79 and 342-488 of SEQ ID NO: 52).

[0853] Another embodiment of the invention includes isolated nucleic acid molecules comprising a polynucleotide having a nucleotide sequence encoding the polypeptide having the human TANGO 216 amino acids, but lacking the N-terminal methionine residue. In this embodiment, the nucleotide sequence of human TANGO 216, nucleotides 310-1770, encodes the human TANGO 216 amino acid sequence from amino acids 2-488 of SEQ ID NO: 52.

[0854] Human TANGO 216 includes a vWF A domain from about amino acids 44 to 213 of SEQ ID NO: 52.

[0855] Human TANGO 216 protein, including the signal sequence, has a molecular weight of 53.6 kDa prior to post-translational modification. Human TANGO 216 protein has a molecular weight of 50.0 kDa after cleavage of the 33 amino acid signal peptide.

[0856] A clone, EpT216, which encodes human TANGO 216 was deposited with the American Type Culture Collection (ATCC®, 10801 University Boulevard, Manassas, Va. 20110-2209) on Mar. 26, 1999, and was assigned Accession Number 207176. This deposit will be maintained under the terms of the Budapest Treaty on the International Recognition of the Deposit of Microorganisms for the Purposes of Patent Procedure. This deposit was made merely as a convenience to those of skill in the art and is not an admission that a deposit is required under 35 U.S.C. §112.

[0857] FIG. 65 depicts a hydropathy plot of human TANGO 216. As shown in the hydropathy plot, the hydrophobic region at the beginning of the plot which corresponds to about amino acids 1 to 33 of SEQ ID NO: 52 is the signal sequence of TANGO 216.

[0858] Northern analysis of human TANGO 216 mRNA expression revealed the presence of an approximately 3.8 kb transcript and an approximately 4.3 kb transcript that are expressed in a range of tissues including lung, liver, skeletal muscle, kidney, and pancreas, with highest expression in heart and placenta. The two transcripts likely represent alternative poly A site usage.

[0859] The human gene for TANGO 216 was mapped on radiation hybrid panels to the long arn of chromosome 4, in the region q 11-13. Flanking markers for this region are GCT14E02 and jktbp-rs2. The JPD (periodontitis, juvenile), and DGI1(dentinogenesis imperfecta) loci also map to this region of the human chromosome. The GRO1 (FRO1 oncogene), ALB (albumin), ALB (interleukin 8), HTN (histatin), and DCK (deoxycytidine kinase) genes also map to this region of the human chromosome. This region is syntenic to mouse chromosome 5. The rs (recessive spotting) locus also maps to this region of the mouse chromosome. The ste (sulfotransferase), areg (amphiregulin), btc (betacellulin), mc (marcel), alb1 (albumin 1), and afp (alpha fetoprotein) genes also map to this region of the mouse chromosome.

[0860] Mouse TANGO 216

[0861] A mouse homolog of human TANGO 216 was identified. A cDNA encoding mouse TANGO 216 was identified by analyzing the sequences of clones present in a mouse bone marrow cDNA library. This analysis led to the identification of a clone, jtmMa005g09, encoding mouse TANGO 216. The mouse TANGO 216 cDNA of this clone is 3501 nucleotides long (FIGS. 64A-64C; SEQ ID NO: 53). The open reading frame of this cDNA (nucleotides 149 to 1609 of SEQ ID NO: 53) encodes the 487 amino acid protein depicted in SEQ ID NO: 54.

[0862] In another embodiment, a mouse TANGO 216 clone comprises a 3647 nucleotide cDNA. The open reading frame of this cDNA comprises nucleotides 32 to 469, and encodes a mouse TANGO 216 transmembrane protein comprising the 146 amino acids.

[0863] In one embodiment, mouse TANGO 216 includes extracellular domains (about amino acids 34 to 79 and 342 to 487, transmembrane (TM) domains (amino acids 80-97 and 318 to 341 of SEQ ID NO: 54); and a cytoplasmic domain (amino acids 98 to 317 of SEQ ID NO: 54). The cytoplasmic domain is very rich in proline and glutamic acid residues. These residues represent 27% of the residues in the cytoplasmic domain of human TANGO 216. Alternatively, in another embodiment, a mouse TANGO 216 protein contains an extracellular domain at amino acid residues 98 to 317, transmembrane (TM) domains (amino acids 80-97 and 318 to 341, and cytoplasmic domains at amino acid residues 1 to 79 and 342-487 of SEQ ID NO: 54.

[0864] The signal peptide prediction program SIGNALP (Nielsen et al. (1997) Protein Engineering 10:1-6) predicted that mouse TANGO 216 includes a 33 amino acid signal peptide (amino acids 1 to about amino acid 336 of SEQ ID NO: 54) preceding the mature TANGO 216 protein (corresponding to about amino acid 34 to amino acid 487 of SEQ ID NO: 54). The presence of a methionine residue at positions 78, 337, 360, 392, 417, 459, and 468 of SEQ ID NO: 54 indicate that there can be alternative forms of mouse TANGO 216 of 410 amino acids, 151 amino acids, 128 amino acids, 96 amino acids, 71 amino acids, 29 amino acids, and 20 amino acids of SEQ ID NO: 54, respectively.

[0865] In one embodiment of a nucleotide sequence of mouse TANGO 216 the nucleotide at position 253 is a guanine (G). In this embodiment, the amino acid at position 35 is glutamate (E). In another embodiment of a nucleotide sequence of mouse TANGO 216, the nucleotide at position 253 is a cytosine (C). In this embodiment, the amino acid at position 35 is aspartate (D). In another embodiment of a nucleotide sequence of mouse TANGO 216, the nucleotide at position 331 is an adenine (A). In this embodiment, the amino acid at position 61 is a glutamate (E). In another embodiment of a nucleotide sequence of mouse TANGO 216, the nucleotide at position 331 is a cytosine (C). In this embodiment, the amino acid at position 61 is aspartate (D). In another embodiment of a nucleotide sequence of mouse TANGO 216, the nucleotide at position 371 is a guanine (G). In this embodiment, the amino acid at position 71 is a glutamate (E). In another embodiment of a nucleotide sequence of mouse TANGO 216, the nucleotide at position 371 is a cytosine (C). In this embodiment, the amino acid at position 71 is aspartate (D).

[0866] Another embodiment of the invention includes isolated nucleic acid molecules comprising a polynucleotide having a nucleotide sequence encoding the polypeptide having the mouse TANGO 216 amino acid sequence, but lacking the N-terminal methionine residue. In this embodiment, the nucleotide sequence of mouse TANGO 216, nucleotides 152-1609, encodes the mouse TANGO 216 amino acid sequence comprising amino acids 2-487 of SEQ ID NO: 54.

[0867] Mouse TANGO 216 includes a vWF A domain from about amino acids 44 to 213 of SEQ ID NO: 54.

[0868] Mouse TANGO 216 protein, including the signal sequence, has a molecular weight of 53.2 kDa prior to post-translational modification. Mouse TANGO 216 protein has a molecular weight of 49.8 kDa after cleavage of the 33 amino acid signal peptide.

[0869] In situ tissue screening was performed on mouse adult and embryonic tissue to analyze the expression of mouse TANGO 216 mRNA. In the case of adult expression, a low level ubiquitous signal was detected in the spleen and stomach. A weak, ubiquitous signal was detected in the thymus. A ubiquitous signal was detected in the liver, submandibular salivary gland, heart, colon, and in the cortical region of the adrenal gland. A multifocal pattern was detected in the lung and in the decidua of the placenta. A signal was apparent in the villi of the small intestine. No signal was detected in the following tissues: brain, spinal cord, eye, brown fat, white fat, pancreas, skeletal muscle, bladder, kidney, and lung.

[0870] In the case of embryonic expression, expression was seen in a number of tissues. At E13.5, strong signals were detected in the developing spinal column, heart, and tongue. Meckelis cartilage was also apparent. Limb expression is not readily apparent. Low level signal was also seen throughout the gut region including but not restricted to lung, liver, and intestines. Signal is noticeably absent from the developing CNS except for the areas of the brain surrounding the lateral ventricals and mesencephalic vesicle. At E14.5, developing spinal column and sternum, heart, tongue, and Meckelis cartilage continued to have strong signal. Signal from the heart and tongue was ubiqutious. In the brain, the diencephalon had the strongest signal with the areas surrounding the ventricles still being positive. At E15.5, signal was seen in the previously stated regions and was readily seen in the primordium of the basisphenoid bone and primordium of the nasal bone. At E16.5, signal was seen in the previously stated regions, primordium of the basisphenoid bone. At E18.5, the strongest signal was obtained in the developing bone and cartilage areas. Signal from the heart was diminished in strength and now equal to that seen in the rest of the gut region. At P1.5, signal was still strong in the spinal column and nasal septum. Signal was absent from the CNS except for faint signal in the region of the developing cerebellum. Signal is otherwise low and ubiquitous except for heart, small intestine, and stomach which have a slightly higher signal. The highest expressing tissue was the capsule of the kidney which was seen at E14.5 and continues to P1.5.

[0871] Human and mouse TANGO 216 sequences exhibit considerable similarity at the protein, nucleic acid, and open reading frame levels. An alignment (made using the ALIGN software (Myers and Miller (1989) CABIOS, ver. 2.0); BLOSUM 62 scoring matrix; gap penalties −12/−4), reveals a protein identity of 84.8%. The human and mouse TANGO 216 full length cDNAs are 84.4% identical, as assessed using the same software and parameters as indicated (without the BLOSUM 62 scoring matrix). In the respective ORFs, calculated in the same fashion as the full length cDNAs, human and mouse TANGO 216 are 84% identical.

[0872] FIG. 66 depicts the alignment of the amino acid sequence of human TANGO 216 and mouse TANGO 216. In this alignment, a (|) between the two sequences indicates an exact match. The depicted alignment of the amino acid sequence of human TANGO 216 (SEQ ID NO: 52) and mouse TANGO 216 (SEQ ID NO: 54) over 146 amino acids of mouse TANGO 216, indicate a percent identity of approximately 65-68%.

[0873] Uses of TANGO 216 Nucleic Acids, Polypeptides, and Modulators Thereof

[0874] The TANGO 216 proteins of the invention include a vWF A domain. Accordingly, TANGO 216 proteins likely function in a similar manner as other proteins which include a vWF A domain, including von Willebrand factor, a large multimeric protein found in platelets, endothelial cells, and plasma. Thus, TANGO 216 modulators can be used to treat any von Willebrand factor-associated disorders and modulate normal von Willebrand factor functions.

[0875] As discussed above, the vWF domain of TANGO 216 is involved in cellular adhesion and interaction with extracellular matrix (ECM) components. Proteins of the type A module superfamily which incorporate a vWF domain participate in multiple ECM and cell/ECM interactions. For example, proteins having a vWF domain have been found to play a role in cellular adhesion, migration, homing, pattern formation and/or signal transduction after interaction with several different ligands (Colombatti et al. (1993) Matrix 13:297-306).

[0876] Similarly, the TANGO 216 proteins of the invention likely play a role in various extracellular matrix interactions, e.g., matrix binding, and/or cellular adhesion. Thus, a TANGO 216 activity is at least one or more of the following activities: 1) regulation of extracellular matrix structuring; 2) modulation of cellular adhesion, either in vitro or in vivo; 3) regulation of cell trafficking and/or migration. Accordingly, the TANGO 216 proteins, nucleic acid molecules and/or modulators can be used to modulate cellular interactions such as cell-cell and/or cell-matrix interactions and thus, to treat disorders associated with abnormal cellular interactions.

[0877] TANGO 216 polypeptides, nucleic acids and/or modulators thereof can also be used to modulate cell adhesion in proliferative disorders, such as cancer. Examples of types of cancers include benign tumors, neoplasms or tumors (such as carcinomas, sarcomas, adenomas or myeloid lymphoma tumors, e.g., fibrosarcoma, myxosarcoma, liposarcoma, chondrosarcoma, osteogenic sarcoma, chordoma, angiosarcoma, endotheliosarcoma, lymphangiosarcoma, lymphangioendotheliosarcoma, synovioma, mesothelioma, Ewing's tumor, leimyosarcoma, rhabdotheliosarcoma, colon sarcoma, pancreatic cancer, breast cancer, ovarian cancer, prostate cancer, squamous cell carcinoma, basal cell carcinoma, adenocarcinoma, sweat gland carcinoma, sebaceous gland carcinoma, papillary carcinoma, papillary adenocarcinomas, cystadenocarcinoma, medullary carcinoma, bronchogenic carcinoma, renal cell carcinoma, hematoma, bile duct carcinoma, melanoma, choriocarcinoma, semicoma, embryonal carcinoma, Wilms' tumor, cervical cancer, testicular tumor, lung carcinoma, small cell carcinoma, bladder carcinoma, epithelial carcinoma, glioma, astrocytoma, medulloblastoma, craniopharyngioma, ependynoma, pinealoma, hemangioblastoma, retinoblastoma), leukemias, (e.g. acute lymphocytic leukemia), acute myelocytic leukemia (myelolastic, promyelocytic, myelomonocytic, monocytic and erythroleukemia), chronic leukemias (chronic myelocytic (granulocytic) leukemia and chronic lymphocytic leukemia), or polycythemia vera, or lymphomas (Hodgkin's disease and non-Hodgkin's diseases), multiple myelomas and Waldrenström's macroglobulinemia.

[0878] As TANGO 216 was originally isolated from a bone marrow library, TANGO 216 nucleic acids, proteins, and modulators thereof can be used to modulate the proliferation, differentiation, and/or function of cells that appear in the bone marrow, e.g., stem cells (e.g., hematopoietic stem cells), and blood cells, e.g., erythrocytes, platelets, and leukocytes. Thus TANGO 269 nucleic acids, proteins, and modulators thereof can be used to treat bone marrow, blood, and hematopoietic associated diseases and disorders, e.g., acute myeloid leukemia, hemophilia, leukemia, anemia (e.g., sickle cell anemia), and thalassemia.

[0879] As TANGO 216 exhibits expression in the embryonic lung, TANGO 216 polypeptides, nucleic acids, or modulators thereof, can be used to treat pulmonary (lung) disorders, such as atelectasis, pulmonary congestion or edema, chronic obstructive airway disease (e.g., emphysema, chronic bronchitis, bronchial asthma, and bronchiectasis), diffuse interstitial diseases (e.g., sarcoidosis, pneumoconiosis, hypersensitivity pneumonitis, Goodpasture's syndrome, idiopathic pulmonary hemosiderosis, pulmonary alveolar proteinosis, desquamative interstitial pneumonitis, chronic interstitial pneumonia, fibrosing alveolitis, hamman-rich syndrome, pulmonary eosinophilia, diffuse interstitial fibrosis, Wegener's granulomatosis, lymphomatoid granulomatosis, and lipid pneumonia), or tumors (e.g., bronchogenic carcinoma, bronchiolovlveolar carcinoma, bronchial carcinoid, hamartoma, and mesenchymal tumors).

[0880] As TANGO 216 exhibits expression in the small intestine, TANGO 216 polypeptides, nucleic acids, or modulators thereof, can be used to treat intestinal disorders, such as ischemic bowel disease, infective enterocolitis, Crohn's disease, benign tumors, malignant tumors (e.g., argentaffinomas, lymphomas, adenocarcinomas, and sarcomas), malabsorption syndromes (e.g., celiac disease, tropical sprue, Whipple's disease, and abetalipoproteinemia), obstructive lesions, hernias, intestinal adhesions, intussusception, or volvulus.

[0881] As TANGO 216 exhibits expression in the spleen, TANGO 216 nucleic acids, proteins, and modulators thereof can be used to modulate the proliferation, diffirentiation, and/or function of cells that form the spleen, e.g., cells of the splenic connective tissue, e.g., splenic smooth muscle cells and/or endothelial cells of the splenic blood vessels. TANGO 216 nucleic acids, proteins, and modulators thereof can also be used to modulate the proliferation, differentiation, and/or function of cells that are processed, e.g. regenerated or phagocytized within the spleen, e.g., erythrocytes and/or B and T lymphocytes and macrophages. Thus, TANGO 216 nucleic acids, proteins, and modulators thereof can be used to treat spleen, e.g., the fetal spleen, associated diseases and disorders. Examples of splenic diseases and disorders include e.g., splenic lymphoma and/or splenomegaly, and/or phagocytotic disorders, e.g., those inhibiting macrophage engulfment of bacteria and viruses in the bloodstream.

[0882] As TANGO 216 is expressed in the kidney, the TANGO 216 polypeptides, nucleic acids and/or modulators thereof can be used to modulate the function, morphology, proliferation and/or differentiation of cells in the tissues in which it is expressed. Such molecules can also be used to treat disorders associated with abnormal or aberrant metabolism or function of cells in the tissues in which it is expressed. Such can be used to treat or modulate renal (kidney) disorders, such as glomerular diseases (e.g., acute and chronic glomerulonephritis, rapidly progressive glomerulonephritis, nephrotic syndrome, focal proliferative glomerulonephritis, glomerular lesions associated with systemic disease, such as systemic lupus erythematosus, Goodpasture's syndrome, multiple myeloma, diabetes, neoplasia, sickle cell disease, and chronic inflammatory diseases), tubular diseases (e.g., acute tubular necrosis and acute renal failure, polycystic renal disease, medullary sponge kidney, medullary cystic disease, nephrogenic diabetes, and renal tubular acidosis), tubulointerstitial diseases (e.g., pyelonephritis, drug and toxin induced tubulointerstitial nephritis, hypercalcemic nephropathy, and hypokalemic nephropathy) acute and rapidly progressive renal failure, chronic renal failure, nephrolithiasis, vascular diseases (e.g., hypertension and nephrosclerosis, microangiopathic hemolytic anemia, atheroembolic renal disease, diffuse cortical necrosis, and renal infarcts), or tumors (e.g., renal cell carcinoma and nephroblastoma).

[0883] As TANGO 216 exhibits expression in the heart, TANGO 216 polypeptides, nucleic acids, or modulators thereof, can be used to treat cardiovascular disorders as described herein.

[0884] As TANGO 216 exhibits expression in bone structures, TANGO 216 nucleic acids, proteins, and modulators thereof can be used to modulate the proliferation, differentiation, and/or function of bone and cartilage cells, e.g., chondrocytes and osteoblasts, and to treat bone and/or cartilage associated diseases or disorders. Examples of bone and/or cartilage diseases and disorders include bone and/or cartilage injury due to for example, trauma (e.g., bone breakage, cartilage tearing), degeneration (e.g., osteoporosis), degeneration of joints, e.g., arthritis, e.g., osteoarthritis, and bone wearing.

[0885] The extracellular region of TANGO 216 has significant similarity to TANGO 197, a secreted protein. TANGO 197 has a vWF A domain and may interact with TANGO 216.

[0886] TANGO 216 likely plays a role in the regulation of binding of cells in circulation to the endothelial substrate. Thus, TANGO 216 may regulate proper flow of cells in the heart, vasculature, and placenta. Accordingly, the TANGO 216 proteins, nucleic acids and/or modulators of the invention are useful modulators of interactions between cells in circulation and endothelial substrate which can be used to treat disorders of such interactions.

[0887] Human TANGO 261

[0888] A cDNA clone, jthda088f09, encoding fall length human TANGO 261 was identified by screening a stimulated human smooth muscle cell library by EST analysis. Another cDNA clone, jthkf124b08, encoding full length human TANGO 261 was identified by screening a stimulated keratinocyte cell library by EST analysis. The 969 nucleotide human TANGO 261 sequence (FIG. 67; SEQ ID NO: 55) includes a open reading frame which extends from nucleotide 6 to nucleotide 761 of SEQ ID NO: 55 and encodes a 252 amino acid secreted protein (SEQ ID NO: 56).

[0889] In another embodiment, a human TANGO 261 clone includes comprises a 1942 nucleotide cDNA. The open reading frame of this cDNA comprises nucleotides 146 to 904, and encodes a transmembrane protein comprising the 252 amino acid sequence.

[0890] In one embodiment of a nucleotide sequence of human TANGO 261 the nucleotide at position 14 is a guanine (G). In this embodiment, the amino acid at position 3 is glutamate (E). In another embodiment of a nucleotide sequence of human TANGO 261, the nucleotide at position 14 is a cytosine (C). In this embodiment, the amino acid at position 3 is aspartate (D) In another embodiment of a nucleotide sequence of human TANGO 261, the nucleotide at position 149 is an adenine (A). In this embodiment, the amino acid at position 48 is a glutamate (E). In another embodiment of a nucleotide sequence of human TANGO 261, the nucleotide at position 149 is a cytosine (C). In this embodiment, the amino acid at position 48 is aspartate (D). In another embodiment of a nucleotide sequence of human TANGO 261, the nucleotide at position 167 is an adenine (A). In this embodiment, the amino acid at position 54 is a glutamate (E). In another embodiment of a nucleotide sequence of human TANGO 261, the nucleotide at position 167 is a cytosine (C). In this embodiment, the amino acid at position 54 is aspartate (D).

[0891] In certain embodiments, a TANGO 261 family member has the amino acid sequence, and the signal sequence is located at amino acids 1 to 26, 1 to 27, 1 to 28, 1 to 29 or 1 to 30 In such embodiments of the invention, the domains and the mature protein resulting from cleavage of such signal peptides are also included herein. For example, the cleavage of a signal sequence consisting of amino acids 1 to 28 (SEQ ID NO: 56) results in a mature TANGO 261 protein corresponding to amino acids 29 to 252 of SEQ ID NO: 56. The signal sequence is normally cleaved during processing of the mature protein. Thus, in one embodiment, a TANGO 261 protein includes a signal sequence and is secreted.

[0892] Another embodiment of the invention includes isolated nucleic acid molecules comprising a polynucleotide having a nucleotide sequence encoding the polypeptide having the human TANGO 261 amino acid sequence but lacking the N-terminal methionine residue. In this embodiment, the nucleotide sequence of human TANGO 261, nucleotides 9-761 of SEQ ID NO: 55, and encodes the human TANGO 261 amino acid sequence comprising amino acids 2-252 of SEQ ID NO: 56.

[0893] Human TANGO 261 includes a signal sequence (amino acid 1 to about amino acid 28 of SEQ ID NO: 56) preceding the mature protein (about amino acid 29 to amino acid 252 of SEQ ID NO: 56). The presence of a methionine residue at positions 16, 17, 19, 162, and 190 indicate that there can be alternative forms of human TANGO 261 of 237 amino acids, 236 amino acids, 234 amino acids, 91 amino acids, and 63 amino acids of SEQ ID NO: 56, respectively.

[0894] Human TANGO 261 protein, including the signal sequence, has a molecular weight of 27.9 kD prior to post-translational modification. Mature human TANGO 261 protein has a molecular weight of 24.8 kD prior to post-translational modification.

[0895] A clone, EpT261, which encodes human TANGO 261 was deposited with the American Type Culture Collection (ATCC®, 10801 University Boulevard, Manassas, Va. 20110-2209) on Mar. 26, 1999, and assigned Accession Number 207176. This deposit will be maintained under the terms of the Budapest Treaty on the International Recognition of the Deposit of Microorganisms for the Purposes of Patent Procedure. This deposit was made merely as a convenience for those of skill in the art and is not an admission that a deposit is required under 35 U.S.C. §112.

[0896] FIG. 69 depicts a hydropathy plot of human TANGO 261. As shown in the hydropathy plot, the hydrophobic region of the plot which corresponds to amino acid 1 to about amino acid 28 is the signal sequence of TANGO 261.

[0897] Northern analysis of human TANGO 261 mRNA expression revealed the presence of an approximately 2.6 kb transcript and an approximately 6.0 kb transcript that are expressed in a range of tissues including lung, liver, kidney, and placenta, with highest expression in heart and skeletal muscle. No expression was observed in colon, thymus, peripheral blood leukocytes, and spleen. The two transcripts likely represent alternative poly A site usage.

[0898] Human TANGO 261 is likely expressed in prostate epithelium, prostate smooth muscle, bone, and brain, based on the origin of ESTs.

[0899] The human gene for TANGO 261 was mapped on radiation hybrid panels to the long arm of chromosome 20, in the region q13.2-13.3. Flanking markers for this region are WI-3773 and AFMA202YB9. The EEGV1 (electroencephalographic variant pattern 1) and PHPLB (pseudohypoparathyroidism) loci also map to this region of the human chromosome. The MC3R (melanocortin 3 receptor), EDN3 (endothelin 3), ADA (adenosine deaminase), and OQTL (obesity QTL) genes also map to this region of the human chromosome. This region is syntenic to mouse chromosome 2. The fc (flecking) and ra (ragged) loci also map to this region of the mouse chromosome. The mc3r (melanocortin 3 receptor), fc (flecking), ra (ragged), and ntsr (neurotensin receptor) genes also map to this region of the mouse chromosome.

[0900] The open reading frame of human TANGO 261 bears significant similarity to the open reading frame of human clone 22 mRNA, alternative splice variant beta 2 (GenBank Accession Number AF009427; Sanders et al. (1997) Am J. Med. Genet. 74:140-9), a gene which has brain-specific expression, produces an 8 kb mRNA encoding a 230 amino acid protein, and maps near the candidate region for bipolar affective disorder on chromosome 18. Human TANGO 261 protein and the protein encoded by clone 22 mRNA, alternative splice variant beta 2 are approximately 70% identical. However, human TANGO 261 does not appear to be brain specific.

[0901] Mouse TANGO 261

[0902] A mouse homolog of human TANGO 261 was identified. A cDNA encoding mouse TANGO 261 was identified by analyzing the sequences of clones present in a mouse microglial cell cDNA library. This analysis led to the identification of a clone, jtmxa004g06, encoding mouse TANGO 261. The mouse TANGO 261 cDNA of this clone is 1713 nucleotides long (FIG. 68; SEQ ID NO: 57). The open reading frame of this cDNA (nucleotides 2 to 652 of SEQ ID NO: 57) encodes a protein comprising a 217 amino acid protein (SEQ ID NO: 58).

[0903] In another embodiment, a mouse TANGO 261 clone includes comprises a 484 nucleotide cDNA. The open reading frame of this cDNA comprises nucleotides 3 to 413, and encodes a transmembrane protein comprising the 137 amino acid sequence.

[0904] The predicted molecular weight of a mouse TANGO 261 protein without post-translational modifications is 23.9 kDa. The presence of a methionine residue at positions 42, 136, and 160 indicate that there can be alternative forms of mouse TANGO 261 comprising 176 amino acids, 82 amino acids, and 58 amino acids of SEQ ID NO: 58, respectively.

[0905] In one embodiment of a nucleotide sequence of mouse TANGO 261 the nucleotide at position 85 is an adenine (A). In this embodiment, the amino acid at position 28 is glutamate (E). In another embodiment of a nucleotide sequence of mouse TANGO 261, the nucleotide at position 85 is a cytosine (C). In this embodiment, the amino acid at position 28 is aspartate (D). In another embodiment of a nucleotide sequence of mouse TANGO 261, the nucleotide at position 106 is a guanine (G). In this embodiment, the amino acid at position 35 is a glutamate (E). In another embodiment of a nucleotide sequence of mouse TANGO 261, the nucleotide at position 106 is a cytosine (C). In this embodiment, the amino acid at position 35 is aspartate (D). In another embodiment of a nucleotide sequence of mouse TANGO 261, the nucleotide at position 133 is a guanine (G). In this embodiment, the amino acid at position 44 is a glutamate (E). In another embodiment of a nucleotide sequence of mouse TANGO 261, the nucleotide at position 133 is a cytosine (C). In this embodiment, the amino acid at position 44 is aspartate (D).

[0906] Another embodiment of the invention includes isolated nucleic acid molecules comprising a polynucleotide having a nucleotide sequence encoding the polypeptide having the mouse TANGO 261 amino acid sequence, but lacking the N-terminal methionine residue. In this embodiment, the nucleotide sequence of mouse TANGO 261, nucleotides 5-652, encodes the mouse TANGO 261 amino acid sequence comprising amino acids 2-217 SEQ ID NO: 58.

[0907] In situ tissue screening was performed on mouse adult and embryonic tissue to analyze for the expression of mouse TANGO 261 mRNA. In the case of adult expression, a signal was observed in the cortex, olfactory bulb, caudate nucleus of the brain as well as in the brain stem. A weak signal was observed in the central grey matter of the spinal cord. A signal was observed in the ganglion cell layer of the eye and harderian gland. A signal was observed in the medulla of the adrenal gland. A moderate signal was observed in the cortex of the thymus. A signal was observed in the follicles of the spleen. A weak, ubiquitous signal was detected in the kidney, brown fat, and submandibular gland. A ubiquitous signal was detected in the liver, submandibular salivary gland, heart, colon, and in the cortical region of the adrenal gland. A signal was also observed in the labyrinth zone of the placenta and the mucosal epithelium of the bladder. A signal was also observed in the ovaries. No expression was observed in white fat, stomach, heart, lung, liver, lymph node, pancreas, skeletal muscle, testes, and small intestine.

[0908] In the case of embryonic expression, expression was seen in a number of tissues. At E13.5, a signal was observed in most tissues, the most noticeable exception being the liver which had a signal near background levels. The highest signal was observed in the ventricles of the brain. At E14.5, the strongest signal was observed in the eye. Weak to moderate signal was observed almost ubiquitously throughout the embryo. At E15.5 and E16.5, a strong signal was observed in the cortical region of the brain and the large vessels of the heart, descending aorta, and vessels associated with the umbilical cord. A moderate, ubiquitous signal was seen in the lung. A weak to moderate signal was observed in most other regions of the embryo. At E18.5, a very strong signal was observed in the eye, specifically the developing retina. A strong signal was also seen in the large vessels of the heart, descending aorta, brown fat and submaxillary gland. A weak signal is observed in several other regions including the brain, intestinal tract, and the bladder. At P1.5, the signal had decreased to nearly background levels in most regions. The strongest signal was associated with the developing incisor teeth and the basio bone. A weak signal is also observed in the cortical and caudate regions of the brain.

[0909] Human and mouse TANGO 261 sequences exhibit considerable similarity at the protein, nucleic acid, and open reading frame levels. An alignment (made using the ALIGN software (Myers and Miller (1989) CABIOS, ver. 2.0); BLOSUM 62 scoring matrix; gap penalties −12/−4), reveals a protein identity of 92.6%. The human and mouse TANGO 261 full length cDNAs are 83.9% identical, as assessed using the same software and parameters as indicated (without the BLOSUM 62 scoring matrix). In the respective ORFs, calculated in the same fashion as the full length cDNAs, human and mouse TANGO 261 are 87.4% identical.

[0910] FIG. 70 depicts the alignment of the amino acid sequence of human TANGO 261 and a portion of mouse TANGO 261. In this alignment, a (¦) between the two sequences indicates an exact match.

[0911] Uses of TANGO 261 Nucleic Acids. Polypeptides. and Modulators Thereof

[0912] The TANGO 261 proteins and nucleic acid molecules of the invention have at least one “TANGO 261 activity” (also referred to herein as “TANGO 261 biological activity”). TANGO 261 activity refers to an activity exerted by a TANGO 261 protein or nucleic acid molecule on a TANGO 261 responsive cell in vivo or in vitro. Such TANGO 261 activities include at least one or more of the following activities: 1) interaction of a TANGO 261 protein with a TANGO 261-target molecule; 2) activation of a TANGO 261 target molecule; 3) modulation of cellular proliferation; 4) modulation of cellular differentiation; or 5) modulation of a signaling pathway. Thus, the TANGO 261 proteins, nucleic acids and/or modulators can be used for the treatment of a disorder characterized by aberrant TANGO 261 expression and/or an aberrant TANGO 261 activity, such as proliferative and/or differentiative disorders.

[0913] As TANGO 261 is expressed in the kidney, the TANGO 261 polypeptides, nucleic acids and/or modulators thereof can be used to modulate the function, morphology, proliferation and/or differentiation of cells in the tissues in which it is expressed. Such molecules can also be used to treat disorders associated with abnormal or aberrant metabolism or function of cells in the tissues in which it is expressed. Such can be used to treat or modulate renal (kidney) disorders, such as glomerular diseases (e.g., acute and chronic glomerulonephritis, rapidly progressive glomerulonephritis, nephrotic syndrome, focal proliferative glomerulonephritis, glomerular lesions associated with systemic disease, such as systemic lupus erythematosus, Goodpasture's syndrome, multiple myeloma, diabetes, neoplasia, sickle cell disease, and chronic inflammatory diseases), tubular diseases (e.g., acute tubular necrosis and acute renal failure, polycystic renal disease, medullary sponge kidney, medullary cystic disease, nephrogenic diabetes, and renal tubular acidosis), tubulointerstitial diseases (e.g., pyelonephritis, drug and toxin induced tubulointerstitial nephritis, hypercalcemic nephropathy, and hypokalemic nephropathy) acute and rapidly progressive renal failure, chronic renal failure, nephrolithiasis, vascular diseases (e.g., hypertension and nephrosclerosis, microangiopathic hemolytic anemia, atheroembolic renal disease, diffuse cortical necrosis, and renal infarcts), or tumors (e.g., renal cell carcinoma and nephroblastoma).

[0914] Because TANGO 261 is expressed in the reproductive tract, particularly in the ovaries, the TANGO 261 polypeptides, nucleic acids and/or modulators thereof can be used to modulate the function, morphology, proliferation and/or differentiation of cells in the tissues in which it is expressed. For example, the TANGO 261 polypeptides, nucleic acids and/or modulators thereof can be used modulate the function, morphology, proliferation and/or differentiation of the ovaries. For example, such molecules can be used to treat or modulate disorders associated with the ovaries, including, without limitation, ovarian tumors, McCune-Albright syndrome (polyostotic fibrous dysplasia). For example, the TANGO 261 polypeptides, nucleic acids and/or modulators can be used in the treatment of infertility.

[0915] As TANGO 261 exhibits expression in the lung, TANGO 261 polypeptides, nucleic acids, or modulators thereof, can be used to treat pulmonary (lung) disorders, such as atelectasis, pulmonary congestion or edema, chronic obstructive airway disease (e.g., emphysema, chronic bronchitis, bronchial asthma, and bronchiectasis), diffuse interstitial diseases (e.g., sarcoidosis, pneumoconiosis, hypersensitivity pneumonitis, Goodpasture's syndrome, idiopathic pulmonary hemosiderosis, pulmonary alveolar proteinosis, desquamative interstitial pneumonitis, chronic interstitial pneumonia, fibrosing alveolitis, hamman-rich syndrome, pulmonary eosinophilia, diffuse interstitial fibrosis, Wegener's granulomatosis, lymphomatoid granulomatosis, and lipid pneumonia), or tumors (e.g., bronchogenic carcinoma, bronchiolovlveolar carcinoma, bronchial carcinoid, haematoma, and mesenchymal tumors).

[0916] As TANGO 261 exhibits expression in the spleen, TANGO 261 nucleic acids, proteins, and modulators thereof can be used to modulate the proliferation, differentiation, and/or function of cells that form the spleen, e.g., cells of the splenic connective tissue, e.g., splenic smooth muscle cells and/or endothelial cells of the splenic blood vessels. TANGO 261 nucleic acids, proteins, and modulators thereof can also be used to modulate the proliferation, differentiation, and/or function of cells that are processed, e.g., regenerated or phagocytized within the spleen, e.g., erythrocytes and/or B and T lymphocytes and macrophages. Thus, TANGO 261 nucleic acids, proteins, and modulators thereof can be used to treat spleen, e.g., the fetal spleen, associated diseases and disorders. Examples of splenic diseases and disorders include e.g., splenic lymphoma and/or splenomegaly, and/or phagocytotic disorders, e.g., those inhibiting macrophage engulfment of bacteria and viruses in the bloodstream.

[0917] As TANGO 261 exhibits expression in the heart, TANGO 261 nucleic acids, proteins, and modulators thereof can be used to treat heart disorders as described herein.

[0918] As TANGO 261 exhibits expression in bone structures, TANGO 261 nucleic acids, proteins, and modulators thereof can be used to modulate the proliferation, differentiation, and/or function of bone and cartilage cells, e.g., chondrocytes and osteoblasts, and to treat bone and/or cartilage associated diseases or disorders. Examples of bone and/or cartilage diseases and disorders include bone and/or cartilage injury due to for example, trauma (e.g., bone breakage, cartilage tearing), degeneration (e.g., osteoporosis), degeneration of joints, e.g., arthritis, e.g., osteoarthritis, and bone wearing.

[0919] In another example, TANGO 261 polypeptides, nucleic acids, or modulators thereof, can be used to treat disorders of the brain, such as cerebral edema, hydrocephalus, brain herniations, iatrogenic disease (due to, e.g., infection, toxins, or drugs), inflammations (e.g., bacterial and viral meningitis, encephalitis, and cerebral toxoplasmosis), cerebrovascular diseases (e.g., hypoxia, ischemia, and infarction, intracranial hemorrhage and vascular malformations, and hypertensive encephalopathy), and tumors (e.g., neuroglial tumors, neuronal tumors, tumors of pineal cells, meningeal tumors, primary and secondary lymphomas, intracranial tumors, and medulloblastoma), and to treat injury or trauma to the brain. Other examples of such brain and CNS related disorders include but are not limited to bacterial and viral meningitis, Alzheimers Disease, cerebral toxoplasmosis, Parkinson's disease, multiple sclerosis, brain cancers (e.g., metastatic carcinoma of the brain, glioblastoma, lymphoma, astrocytoma, acoustic neuroma), hydrocephalus, and encephalitis.

[0920] In another example, TANGO 261 polypeptides, nucleic acids, or modulators thereof, can be used to treat hepatic (liver) disorders, such as jaundice, hepatic failure, hereditary hyperbiliruinemias (e.g., Gilbert's syndrome, Crigler-Naijar syndromes and Dubin-Johnson and Rotor's syndromes), hepatic circulatory disorders (e.g., hepatic vein thrombosis and portal vein obstruction and thrombosis) hepatitis (e.g., chronic active hepatitis, acute viral hepatitis, and toxic and drug-induced hepatitis) cirrhosis (e.g., alcoholic cirrhosis, biliary cirrhosis, and hemochromatosis), or malignant tumors (e.g., primary carcinoma, hepatoblastoma, and angiosarcoma).

[0921] In another example, TANGO 261 polypeptides, nucleic acids, or modulators thereof, can be used to treat renal (kidney) disorders, such as glomerular diseases (e.g., acute and chronic glomerulonephritis, rapidly progressive glomerulonephritis, nephrotic syndrome, focal proliferative glomerulonephritis, glomerular lesions associated with systemic disease, such as systemic lupus erythematosus, Goodpasture's syndrome, multiple myeloma, diabetes, neoplasia, sickle cell disease, and chronic inflammatory diseases), tubular diseases (e.g., acute tubular necrosis and acute renal failure, polycystic renal diseasemedullary sponge kidney, medullary cystic disease, nephrogenic diabetes, and renal tubular acidosis), tubulointerstitial diseases (e.g., pyelonephritis, drug and toxin induced tubulointerstitial nephritis, hypercalcemic nephropathy, and hypokalemic nephropathy) acute and rapidly progressive renal failure, chronic renal failure, nephrolithiasis, vascular diseases (e.g., hypertension and nephrosclerosis, microangiopathic hemolytic anemia, atheroembolic renal disease, diffuse cortical necrosis, and renal infarcts), or tumors (e.g., renal cell carcinoma and nephroblastoma).

[0922] In another example, as TANGO 261 exhibits expression in the brain, TANGO 261 polypeptides, nucleic acids, or modulators thereof, can be used to treat disorders of the brain, such as cerebral edema, hydrocephalus, brain herniations, iatrogenic disease (due to, e.g., infection, toxins, or drugs), inflammations (e.g., bacterial and viral meningitis, encephalitis, and cerebral toxoplasmosis), cerebrovascular diseases (e.g., hypoxia, ischemia, and infarction, intracranial hemorrhage and vascular malformations, and hypertensive encephalopathy), and tumors (e.g., neuroglial tumors, neuronal tumors, tumors of pineal cells, meningeal tumors, primary and secondary lymphomas, intracranial tumors, and medulloblastoma), and to treat injury or trauma to the brain. Other examples of such brain and CNS related disorders include, but are not limited to, bacterial and viral meningitis, Alzheimers Disease, cerebral toxoplasmosis, Parkinson's disease, multiple sclerosis, brain cancers (e.g., metastatic carcinoma of the brain, glioblastoma, lymphoma, astrocytoma, acoustic neuroma), hydrocephalus, and encephalitis.

[0923] In another example, TANGO 261 polypeptides, nucleic acids, or modulators thereof, can be used to treat prostate disorders, such as inflammatory diseases (e.g., acute and chronic prostatitis and granulomatous prostatitis), hyperplasia (e.g., benign prostatic hypertrophy or hyperplasia), or tumors (e.g., carcinomas).

[0924] In another example, TANGO 261 polypeptides, nucleic acids, or modulators thereof, can be used to treat eye disorders, e.g., retinitis pigmentosa, cataract, retinalastoma, color blindness, conjunctivitis, myopia, dry eyes, keratoconus, glaucoma, macular degeneration, microphthalmia and anophthalmia, nystagmus, and trachoma.

[0925] Tango 262

[0926] In another aspect, the present invention is based on the discovery of nucleic acid sequences which encode a novel family of proteins referred to herein as TANGO 262 proteins. Described herein are human TANGO 262, and mouse TANGO 262 nucleic acid molecules and the corresponding polypeptides which the nucleic acid molecules encode.

[0927] Also included within the scope of the present invention are TANGO 262 proteins having a signal sequence.

[0928] In certain embodiments, a TANGO 262 family member has the amino acid sequence, and the signal sequence is located at amino acids 1 to 19, 1 to 20, 1 to 21, 1 to 22 or 1 to 23. In such embodiments of the invention, the domains and the mature protein resulting from cleavage of such signal peptides are also included herein. For example, the cleavage of a signal sequence consisting of amino acids 1 to 21 results in a mature TANGO 262 protein corresponding to amino acids 22 to 226 of SEQ ID NO: 60. The signal sequence is normally cleaved during processing of the mature protein.

[0929] In one embodiment, a TANGO 262 protein includes a signal sequence and is secreted.

[0930] Human Tango 262

[0931] Two clones were originally found in a fetal lung and kidney cell library, as ESTs with similarity to a C. elegans protein encoding gene. The full length sequence was eventually found in a stimulated kidney cell library. A cDNA clone, jthKa045gl 1, encoding full length human TANGO 262 was identified by screening a stimulated human kidney cell library by EST analysis. The 1682 nucleotide human TANGO 262 sequence (FIGS. 71A-71B; SEQ ID NO: 59) includes an open reading frame which extends from nucleotide 322 to nucleotide 999 of SEQ ID NO: 59 and encodes a 226 amino acid secreted protein depicted in SEQ ID NO: 60.

[0932] In another embodiment, a cDNA encoding human TANGO 262 was identified by analyzing the sequences of clones present in a human a fetal lung library by EST analysis for sequences that encode wholly secreted or transmembrane proteins. This analysis led to the identification of a clone, jthKa045g11, comprising a 1510 nucleotide cDNA. The open reading frame of this cDNA comprises nucleotides 325 to 1005, and encodes a transmembrane protein comprising a 226 amino acid polypeptide.

[0933] In one embodiment of a nucleotide sequence of human TANGO 262 the nucleotide at position 28 is a guanine (G). In this embodiment, the amino acid at position 2 is glutamate (E). In another embodiment of a nucleotide sequence of human TANGO 262, the nucleotide at position 28 is a cytosine (C). In this embodiment, the amino acid at position 2 is aspartate (D). In another embodiment of a nucleotide sequence of human TANGO 262, the nucleotide at position 483 is a guanine (G). In this embodiment, the amino acid at position 54 is a glutamate (E). In another embodiment of a nucleotide sequence of human TANGO 262, the nucleotide at position 483 is a cytosine (C). In this embodiment, the amino acid at position 54 is aspartate (D). In another embodiment of a nucleotide sequence of human TANGO 262, the nucleotide at position 495 is a guanine (G). In this embodiment, the amino acid at position 58 is a glutamate (E). In another embodiment of a nucleotide sequence of human TANGO 262, the nucleotide at position 495 is a cytosine (C). In this embodiment, the amino acid at position 58 is aspartate (D).

[0934] Another embodiment of the invention includes isolated nucleic acid molecules comprising a polynucleotide having a nucleotide sequence encoding the polypeptide having the human TANGO 262 amino acid sequence, but lacking the N-terminal methionine residue. In this embodiment, the nucleotide sequence of human TANGO 262, nucleotides 325-999, encodes the human TANGO 262 amino acid sequence comprising amino acids 2-226.

[0935] Human TANGO 262 includes an signal sequence (amino acid 1 to about amino acid 21 of SEQ ID NO: 60) preceding the mature protein (about amino acid 22 to amino acid 226 of SEQ ID NO: 60). Human TANGO 262 protein, including the signal sequence, has a molecular weight of 24.6 kDa prior to post-translational modification. Mature human TANGO 262 protein has a molecular weight of 22.5 kDa after post-translational modification. The presence of a methionine residue at positions 53, 91, 111, 119, and 146 indicate that there can be alternative forms of human TANGO 262 of 174 amino acids, 136 amino acids, 116 amino acids, 108 amino acids, and 81 amino acids of SEQ ID NO: 60, respectively.

[0936] In one embodiment, mouse TANGO 262 includes an extracellular domain at amino acids 22 to 226 of SEQ ID NO: 60.

[0937] A clone, EpT262, which encodes human TANGO 262 was deposited with the American Type Culture Collection (ATCC(O, 10801 University Boulevard, Manassas, Va. 520110-2209) on Mar. 26, 1999, and assigned Accession Number 207176. This deposit will be maintained under the terms of the Budapest Treaty on the International Recognition of the Deposit of Microorganisms for the Purposes of Patent Procedure. This deposit was made merely as a convenience for those of skill in the art and is not an admission that a deposit is required under 35 U.S.C. §112.

[0938] FIG. 73 depicts a hydropathy plot of human TANGO 262. As shown in the hydropathy plot, the hydrophobic region of the plot which corresponds to amino acid 1 to about amino acid 21 is the signal sequence of human TANGO 262.

[0939] Northern analysis of human TANGO 262 mRNA expression revealed the presence of an approximately 1.8 kb transcript and an approximately 5.05 kb transcript that are expressed in a range of tissues including strong expression in heart; expression in the brain, skeletal muscle, kidney, liver, small intestine, lung, and placenta. No expression was detected in the colon, thymus, peripheral blood leukocytes, and spleen. The two transcripts likely represent alternative poly A site usage.

[0940] Human TANGO 262 is likely expressed in kidney, neuronal cells, placenta, bone, and fetal adrenal tissue, based on the origin of ESTs.

[0941] The human gene for TANGO 262 was mapped on radiation hybrid panels to the long arm of chromosome 14, in the region q23-q24. Flanking markers for this region are WI-6253 and WI-5815. The FNTB (fanesyltransferase) and MNAT1 (menage) genes also map to this region of the human chromosome. This region is syntenic to mouse chromosome 12.

[0942] Mouse TANGO 262

[0943] A mouse homolog of human TANGO 262 was identified. A cDNA encoding mouse TANGO 262 was identified by analyzing the sequences of clones present in a mouse microglial cell cDNA library. This analysis led to the identification of a clone, jtmxa002h01, encoding mouse TANGO 262. The mouse TANGO 262 cDNA of this clone is 1425 nucleotides long (FIGS. 72A-72B; SEQ ID NO: 61). The open reading frame of this cDNA comprises nucleotides 89 to 766 of SEQ ID NO: 61, and encodes the 226 amino acid mouse TANGO 262 secreted protein depicted in SEQ ID NO: 62.

[0944] In another embodiment, a mouse TANGO 262 clone includes comprises a 460 nucleotide cDNA. The open reading frame of this cDNA comprises nucleotides 83 to 460, and encodes a transmembrane protein comprising a 126 amino acid polypeptide.

[0945] The signal peptide prediction program SIGNALP (Nielsen et al. (1997) Protein Engineering 10: 1-6) predicted that mouse TANGO 262 includes a 21 amino acid signal peptide (amino acids 1 to about amino acid 21 of SEQ ID NO: 62) preceding the mature TANGO 262 protein (corresponding to about amino acid 22 to amino acid 226 of SEQ ID NO: 62). Mouse TANGO 262 protein, including the signal sequence, has a molecular weight of 24.7 kDa prior to post-translational modification. Mature mouse TANGO 262 protein has a molecular weight of 22.5 kDa after post-translational modification. The presence of a methionine residue at positions 53, 91, 111, 113, 119, and 147 indicate that there can be alternative forms of mouse TANGO 262 of 174 amino acids, 136 amino acids, 116 amino acids, 114 amino acids, 108 amino acids, and 80 amino acids of SEQ ID NO: 62, respectively.

[0946] In one embodiment of a nucleotide sequence of mouse TANGO 262 the nucleotide at position 94 is a guanine (G). In this embodiment, the amino acid at position 2 is glutamate (E). In another embodiment of a nucleotide sequence of mouse TANGO 262, the nucleotide at position 94 is a cytosine (C). In this embodiment, the amino acid at position 2 is aspartate (D). In another embodiment of a nucleotide sequence of mouse TANGO 262, the nucleotide at position 250 is a guanine (G). In this embodiment, the amino acid at position 54 is a glutamate (E). In another embodiment of a nucleotide sequence of mouse TANGO 262, the nucleotide at position 250 is a cytosine (C). In this embodiment, the amino acid at position 54 is aspartate (D). In another embodiment of a nucleotide sequence of mouse TANGO 262, the nucleotide at position 262 is an adenine (A). In this embodiment, the amino acid at position 58 is a glutamate (E). In another embodiment of a nucleotide sequence of mouse TANGO 262, the nucleotide at position 262 is a cytosine (C). In this embodiment, the amino acid at position 58 is aspartate (D).

[0947] Another embodiment of the invention includes isolated nucleic acid molecules comprising a polynucleotide having a nucleotide sequence encoding the polypeptide having the mouse TANGO 262 amino acid polypeptide, but lacking the N-terminal methionine residue. In this embodiment, the nucleotide sequence of mouse TANGO 262, nucleotides 92-766 of SEQ ID NO: 61, encodes the mouse TANGO 262 amino acid sequence comprising amino acids 2-226 of SEQ ID NO: 62.

[0948] In situ tissue screening was performed on mouse adult and embryonic tissue to analyze for the expression of mouse TANGO 262 mRNA. Expression was widespread during the earlier embryonic ages examined. Expression in the limb, facial, and gut tissues suggested that skeletal muscle may be the predominant contributor to the signal observed in these areas. Strong expression was also seen in the brain and was localized to the area surrounding the lateral ventricles. Spinal cord and other regions of the brain had a significant decrease or lack of expression. Mid and late stage embryos lacked the broad signal seen at earlier ages and had signal in a more defined pattern. The tissues lung, heart, kidney, eye, mucosal epithelium region of the stomach, and the intestinal tract all exhibited strong expression. The area of the brain in contact with the lateral ventricles remained high in expression until E18.5 and then became localized to the choroid plexus. Adult expression remained high in the gut with the stomach, small intestine, and colon all exhibiting strong expression. Kidney and adrenal gland also had expression, as did the choroid plexus as observed in the late stage embryos.

[0949] In the case of adult expression, the following results were obtained: A signal was observed in the brain in the choroid plexus of the lateral and 4th ventricles. A strong signal was observed in the mucosal epithelium of the stomach and the colon. A signal was observed in the region of the pericardium of the heart. A weak signal was observed in the ganglion layer of the eye and the harderian gland. A strong, ubiquitous signal was observed in the submandibular gland. A signal was observed in the cortical region of the kidney consistent with the pattern of glomeruli. There was also a ubiquitous signal in the medulla. A strong signal was observed in the cortical region of the adrenal gland. A strong signal was also obtained in the epithelium and villi of the small intestine. A signal was observed in the skeletal muscle/smooth muscle particularly the diaphragm and peritoneum). A signal was observed in the mucosal epithelium and the serosa of the bladder. No expression was observed in the spinal cord, white fat, brown fat, lung, liver, thymus, lymph node, spleen, and pancreas.

[0950] In the case of embryonic expression, the following results were obtained: At E13.5, a signal was observed in a large number of tissues. The signal in the brain was very strong adjacent to the ventricles. The facial region, diaphragm, lung, kidney, and limbs exhibited a very strong signal. A broad expression signal pattern in the limbs suggested developing skeletal muscle. At E14.5, the signal was widely distributed throughout. Tissues lacking strong signal included the brain, except in the regions adjacent to ventricle, the spinal cord, and the liver. At E15.5, a strong signal was observed in the eye, lung, gut, kidney, and the digits of limbs. A signal was also seen in the whisker pads, brain adjacent to the ventricles, Meckel's cartilage, submaxillary gland, heart, and the peritoneum. At E16.5, the signal in the limbs and facial area had decreased to almost background levels suggesting a decrease or loss in signal from developing skeletal muscle. A strong signal was still observed in the eye, ventricle areas of the brain, whisker pads, Meckel's cartilage, submaxillary gland, heart, lung, and kidney. Signal was clearly observed in the mucosal portion of the stomach and the small intestine. At E18.5, the signal pattern is very similar to that observed at E16.5 with the noticeable exception being a significant decrease in signal in the brain adjacent to the ventricles and an increase in signal in the cortical and olfactory bulb areas. The continued decrease in possible muscle or connective tissue signal made the signal in the gut, small intestine and stomach, kidney, lung, and submaxillary gland even more pronounced. At P1.5, a strong signal was observed in the eye, submaxillary gland, kidney, the portion of the stomach containing the mucosal epithelium, and the intestinal tract. A less intense signal was seen in the upper and lower mandible, and the lung. The signal in the brain had decreased to almost background levels except in the choroid plexus.

[0951] Human and mouse TANGO 262 sequences exhibit considerable similarity at the protein, nucleic acid, and open reading frame levels. An alignment (made using the ALIGN software (Myers and Miller (1989) CABIOS, ver. 2.0); BLOSUM 62 scoring matrix; gap penalties −12/−4), reveals a protein identity of 98.7% over the length of the mouse TANGO 226 protein. The human and mouse TANGO 262 full length cDNAs are 77.0% identical, as assessed using the same software and parameters as indicated (without the BLOSUM 62 scoring matrix). In the respective ORFs, calculated in the same fashion as the full length cDNAs, human and mouse TANGO 262 are 88.5% identical.

[0952] FIG. 74 depicts the alignment of the amino acid sequence of human TANGO 262 and the mouse TANGO 262 amino acid sequence. In this alignment, a (¦) between the two sequences indicates an exact match.

[0953] Human TANGO 262 protein bears similarity C. elegans protein K10C3.4. Genbank Accession Number AC003687 appears to be the genomic sequence of human TANGO 262 (FIG. 75).

[0954] Uses of TANGO 262 Nucleic Acids, Polypeptides, and Modulators Thereof

[0955] The TANGO 262 proteins and nucleic acid molecules of the invention have at least one “TANGO 262 activity” (also referred to herein as “TANGO 262 biological activity”). TANGO 262 activity refers to an activity exerted by a TANGO 262 protein or nucleic acid molecule on a TANGO 262 responsive cell in vivo or in vitro. Such TANGO 262 activities include at least one or more of the following activities: 1) interaction of a TANGO 262 protein with a TANGO 262-target molecule; 2) activation of a TANGO 262 target molecule; 3) modulation of cellular proliferation; 4) modulation of cellular differentiation; or 5) modulation of a signaling pathway. Thus, the TANGO 262 proteins, nucleic acids and/or modulators can be used for the treatment of a disorder characterized by aberrant TANGO 262 expression and/or an aberrant TANGO 262 activity, such as proliferative and/or differentiative disorders.

[0956] TANGO 262 proteins, nucleic acids and/or modulators of the invention are useful in the treatment of disorders of the kidney, nervous system, bone, and adrenal gland.

[0957] As TANGO 262 is expressed in the kidney, the TANGO 262 polypeptides, nucleic acids and/or modulators thereof can be used to modulate the function, morphology, proliferation and/or differentiation of cells in the tissues in which it is expressed. Such molecules can also be used to treat disorders associated with abnormal or aberrant metabolism or function of cells in the tissues in which it is expressed. Such can be used to treat or modulate renal (kidney) disorders, such as glomerular diseases (e.g., acute and chronic glomerulonephritis, rapidly progressive glomerulonephritis, nephrotic syndrome, focal proliferative glomerulonephritis, glomerular lesions associated with systemic disease, such as systemic lupus erythematosus, Goodpasture's syndrome, multiple myeloma, diabetes, neoplasia, sickle cell disease, and chronic inflammatory diseases), tubular diseases (e.g., acute tubular necrosis and acute renal failure, polycystic renal disease, medullary sponge kidney, medullary cystic disease, nephrogenic diabetes, and renal tubular acidosis), tubulointerstitial diseases (e.g., pyelonephritis, drug and toxin induced tubulointerstitial nephritis, hypercalcemic nephropathy, and hypokalemic nephropathy) acute and rapidly progressive renal failure, chronic renal failure, nephrolithiasis, vascular diseases (e.g., hypertension and nephrosclerosis, microangiopathic hemolytic anemia, atheroembolic renal disease, diffuse cortical necrosis, and renal infarcts), or tumors (e.g., renal cell carcinoma and nephroblastoma).

[0958] As TANGO 262 exhibits expression in the lung, TANGO 262 polypeptides, nucleic acids, or modulators thereof, can be used to treat pulmonary (lung) disorders, such as atelectasis, pulmonary congestion or edema, chronic obstructive airway disease (e.g., emphysema, chronic bronchitis, bronchial asthma, and bronchiectasis), diffuse interstitial diseases (e.g., sarcoidosis, pneumoconiosis, hypersensitivity pneumonitis, Goodpasture's syndrome, idiopathic pulmonary hemosiderosis, pulmonary alveolar proteinosis, desquamative interstitial pneumonitis, chronic interstitial pneumonia, fibrosing alveolitis, hamman-rich syndrome, pulmonary eosinophilia, diffuse interstitial fibrosis, Wegener's granulomatosis, lymphomatoid granulomatosis, and lipid pneumonia), or tumors (e.g., bronchogenic carcinoma, bronchiolovlveolar carcinoma, bronchial carcinoid, hamartoma, and mesenchymal tumors).

[0959] As TANGO 262 exhibits expression in the heart, TANGO 262 nucleic acids, proteins, and modulators thereof can be used to treat heart disorders as described herein.

[0960] As TANGO 262 exhibits expression in the small intestine, TANGO 262 polypeptides, nucleic acids, or modulators thereof, can be used to treat intestinal disorders, such as ischemic bowel disease, infective enterocolitis, Crohn's disease, benign tumors, malignant tumors (e.g., argentaffinomas, lymphomas, adenocarcinomas, and sarcomas), malabsorption syndromes (e.g., celiac disease, tropical sprue, Whipple's disease, and abetalipoproteinemia), obstructive lesions, hernias, intestinal adhesions, intussusception, or volvulus.

[0961] In another example, TANGO 262 polypeptides, nucleic acids, or modulators thereof, can be used to treat hepatic (liver) disorders, such as jaundice, hepatic failure, hereditary hyperbiliruinemias (e.g., Gilbert's syndrome, Crigler-Naijar syndromes and Dubin-Johnson and Rotor's syndromes), hepatic circulatory disorders (e.g., hepatic vein thrombosis and portal vein obstruction and thrombosis) hepatitis (e.g., chronic active hepatitis, acute viral hepatitis, and toxic and drug-induced hepatitis) cirrhosis (e.g., alcoholic cirrhosis, biliary cirrhosis, and hemochromatosis), or malignant tumors (e.g., primary carcinoma, hepatoblastoma, and angiosarcoma).

[0962] In another example, TANGO 262 polypeptides, nucleic acids, or modulators thereof, can be used to treat renal (kidney) disorders, such as glomerular diseases (e.g., acute and chronic glomerulonephritis, rapidly progressive glomerulonephritis, nephrotic syndrome, focal proliferative glomerulonephritis, glomerular lesions associated with systemic disease, such as systemic lupus erythematosus, Goodpasture's syndrome, multiple myeloma, diabetes, neoplasia, sickle cell disease, and chronic inflammatory diseases), tubular diseases (e.g., acute tubular necrosis and acute renal failure, polycystic renal diseasemedullary sponge kidney, medullary cystic disease, nephrogenic diabetes, and renal tubular acidosis), tubulointerstitial diseases (e.g., pyelonephritis, drug and toxin induced tubulointerstitial nephritis, hypercalcemic nephropathy, and hypokalemic nephropathy) acute and rapidly progressive renal failure, chronic renal failure, nephrolithiasis, vascular diseases (e.g., hypertension and nephrosclerosis, microangiopathic hemolytic anemia, atheroembolic renal disease, diffuse cortical necrosis, and renal infarcts), or tumors (e.g., renal cell carcinoma and nephroblastoma).

[0963] Tango 266

[0964] In another aspect, the present invention is based on the discovery of nucleic acid sequences which encode a novel family of proteins referred to herein as TANGO 266 proteins. Described herein is a human TANGO 266 nucleic acid molecule and the corresponding protein which the nucleic acid molecule encodes.

[0965] Also included within the scope of the present invention are TANGO 266 proteins having a signal sequence.

[0966] In certain embodiments, a TANGO 266 family member has the amino acid sequence, and the signal sequence is located at amino acids 1 to 17, 1 to 18, 1 to 19, 1 to 20 or 1 to 21. In such embodiments of the invention, the domains and the mature protein resulting from cleavage of such signal peptides are also included herein. For example, the cleavage of a signal sequence consisting of amino acids 1 to 19 of SEQ ID NO: 64 results in a mature TANGO 266 protein corresponding to amino acids 20 to 105 of SEQ ID NO: 64. The signal sequence is normally cleaved during processing of the mature protein.

[0967] Thus, in one embodiment, a TANGO 266 protein includes a signal sequence and is secreted.

[0968] Human TANGO 266

[0969] A sequence encoding human TANGO 266 was identified by screening a human adrenal gland library by EST analysis. The 1422 nucleotide human TANGO 266 sequence (FIG. 76; SEQ ID NO: 63) includes an open reading frame which extends from nucleotide 49 to nucleotide 363 of SEQ ID NO: 63 and encodes a 105 amino acid protein (SEQ ID NO: 64).

[0970] In another embodiment, a human TANGO 266 clone includes comprises a 422 nucleotide cDNA. The open reading frame of this cDNA comprises nucleotides 56 to 373, and encodes a transmembrane protein comprising an 105 amino acid polypeptide.

[0971] In one embodiment of a nucleotide sequence of human TANGO 266 the nucleotide at position 129 is a guanine (G). In this embodiment, the amino acid at position 27 is glutamate (E). In another embodiment of a nucleotide sequence of human TANGO 266, the nucleotide at position 129 is a cytosine (C). In this embodiment, the amino acid at position 27 is aspartate (D). In another embodiment of a nucleotide sequence of human TANGO 266, the nucleotide at position 216 is an adenine (A). In this embodiment, the amino acid at position 56 is a glutamate (E). In another embodiment of a nucleotide sequence of human TANGO 266, the nucleotide at position 216 is a cytosine (C). In this embodiment, the amino acid at position 56 is aspartate (D). In another embodiment of a nucleotide sequence of human TANGO 266, the nucleotide at position 222 is a guanine (G). In this embodiment, the amino acid at position 58 is a glutamate (E). In another embodiment of a nucleotide sequence of human TANGO 266, the nucleotide at position 222 is a cytosine (C). In this embodiment, the amino acid at position 58 is aspartate (D).

[0972] Another embodiment of the invention includes isolated nucleic acid molecules comprising a polynucleotide having a nucleotide sequence encoding the polypeptide having the human TANGO 266 polypeptide, but lacking the N-terminal methionine residue. In this embodiment, the nucleotide sequence of human TANGO 266, nucleotides 52-363 of SEQ ID NO: 63, encodes the human TANGO 216 amino acid sequence comprising amino acids 2-105 of SEQ ID NO: 64.

[0973] Human TANGO 266 includes a signal sequence (amino acid 1 to about amino acid 19 of SEQ ID NO: 64) preceding the mature protein (about amino acid 20 to amino acid 105 of SEQ ID NO: 64). Human TANGO 266 protein, including the signal sequence, has a molecular weight of 11.7 kDa prior to post-translational modification. Mature human TANGO 266 protein has a molecular weight of 9.7 kDa after post-translational modification. The presence of a methionine residue at positions 10, 49, and 98 indicate that there can be alternative forms of human TANGO 266 of 96 amino acids, 57 amino acids, and 8 amino acids of SEQ ID NO: 64, respectively.

[0974] A clone, EpT266, which encodes human TANGO 266 was deposited with the American Type Culture Collection (ATCC®, 10801 University Boulevard, Manassas, Va. 20110-2209) on Mar. 26, 1999, and assigned Accession Number 207176. This deposit will be maintained under the terms of the Budapest Treaty on the International Recognition of the Deposit of Microorganisms for the Purposes of Patent Procedure. This deposit was made merely as a convenience for those of skill in the art and is not an admission that a deposit is required under 35 U.S.C. §112.

[0975] FIG. 77 depicts a hydropathy plot of human TANGO 266. As shown in the hydropathy plot, the hydrophobic region of the plot which corresponds to amino acid 1 to about amino acid 19 is the signal sequence of human TANGO 266.

[0976] Northern analysis of human TANGO 266 mRNA expression revealed the presence of an approximately 1.7 kb transcript that is expressed in a range of tissues including very strong expression in placenta; and weak expression in heart. An additional Northern was performed on human TANGO 266 in which strong expression was detected in the adrenal medulla and testis, and moderate expression was detected in the adrenal cortex. No expression was detected in the brain, lung, liver, skeletal muscle, kidney, and pancreas.

[0977] In situ tissue screening was performed on mouse adult and embryonic tissue to analyze for the expression of human TANGO 266 mRNA. Consistent with the Northern results obtained above, expression was seen in the ovarian stroma and placenta. The pattern of the signal suggested expression by a component of the vasculature. A stronger signal was observed in the testes. The pattern was multifocal and did not suggest expression by seminiferous tubules. Photoemulsion can be used to determine the exact cellular component of these tissues expressing human TANGO 266 mRNA.

[0978] Specifically, in the case of adult expression, a strong, multifocal signal was detected in the testes. A moderate signal was detected in the placenta. No expression was detected in the following tissues: brain (cerebellum), submandibular gland, heart, liver, kidney, colon, small intestine, and spleen.

### Example 1

[0979] Isolation And Characterization of HUMAN TANGO 266 cDNAs

[0980] A human TANGO 266 cDNA was isolated from a human adrenal gland cDNA library. A cDNA library from human adult adrenal gland RNA was constructed and sequenced by automated high throughput single pass sequencing, and individual clones analyzed for homology to known proteins. A cDNA clone (TANGO 266) was found initially to have significant homology only to venom protein A (VPRA), found in high abundance in the venom of the black mamba (Dendroaspis polylepsis)(Schweitz, H., Didard, J. & Lazdunski, M. (1990) Toxicon 28, 847-856)(Boisbouvier, J. et al. (1998) J. Mol. Biol. 283, 205-219). TANGO 266 was found to be 58% identical to VPRA over the 81 residues of reported amino acid sequence (FIG. 78). Recently, a similar protein (Bv8) was isolated from skin secretions of the frog Bombina Variegata (Mollay, C. et al. (1999) Eur. J. Pharmacol. 374, 189-196) and the peptide sequence was used to clone the frog, mouse and human Bv8 cDNAs (Wechselberger, C. et al. (1999) FEBS Lett. 462, 177-181). The partial human Bv8 sequence reported was compared to that of TANGO 266 and found have 45% identity over the length of the published sequence.

[0981] Human TANGO 266 protein bears similarity to Dendroaspis polypepis polypepis venom protein A (SwissProt Accession Number P25687; Joubert and Strydom (1980) Hoppe Seylers ZPhysiol. Chem. 361:1787-94). FIG. 78 depicts the alignment of the amino acid sequence of human TANGO 266 and Dendroaspis polypepis polypepis venom protein A. In this alignment, a (a) between the two sequences indicates an exact match. The cysteines at residues at positions 26, 32, 38, 50, 60, 78, 80, 86, and 96 of human TANGO 266 (SEQ ID NO: 64) are conserved between human TANGO 266 and Dendroaspis polypepis polypepis venom protein A, suggesting that these cysteines form disulfide bonds. A cysteine at amino acid position 37 in TANGO 266 (SEQ ID NO: 64) is not found at the corresponding position in Dendroaspis polypepis polypepis venom protein A. However, a tenth cysteine occurs four residues beyond the corresponding position. This tenth cysteine residue is likely able to interact with its partner from either position.

[0982] Comparison of mouse Bv8 variant 3 to VPRA and TANGO 266 is shown in FIGS. 81A-81D. Mouse Bv8 is closer in homology to VPRA than TANGO 266, with 60% identity over the region of the VPRA peptide sequence, whereas TANGO 266 shares 54% identity with VPRA. The primary structure of TANGO 266 is similar to Bv8 and VPRA, with identical amino terminal sequences (AVITGAC) and conservation of 10 cysteines in the mature protein, with the exception of VPRA, which lacks the first cysteine. The complete TANGO 266 cDNA (1,422 bp) encodes a 105 residue protein with a predicted molecular mass of 11,714 Daltons.

### Example 2

[0983] Determination of TANGO 266 as Secreted Protein

[0984] To determine if the signal peptide prediction correctly determined that TANGO 266 is a secreted protein, cell lines were transfected with TANGO 266 cDNA and subjected to a secretion assay, and their supernatants were probed with rabbit anti human TANGO 266 peptide polyclonal antisera (as discussed below). 293 cells were transfected with expression vectors carrying TANGO 266 Fc-tagged fusion protein, alkaline phosphatase (AP) tagged fusion protein, or with a retroviral vector expressing the native protein.

[0985] Media from transfected cells was collected and evaluated by Western for presence of secreted protein (FIG. 81D). In all instances polyclonal anti-TANGO 266 recognized native or tagged protein. In addition, TANGO 266 could be detected in media of 3T3 cells infected with a retrovirus expressing native TANGO 266, but not in control cells infected with an empty vector. The procedures utilized for creation of fusion proteins, for production of the anti-TANGO 266 antibody, and for testing protein secretion, are as follows:

[0986] Creation of TANGO 266 Fusion Proteins

[0987] TANGO 266 was amplified by PCR and cloned into expression vectors containing different epitope tags. The following oligos were used:

P1: 5′ TTTTTGAATTCACCGCCATGAGAGGTGCCACGCGAG 3′
P2: 5′ TTTTTCTCGAGAAAATTGATGTTCTTCAAGTCCA 3′
P3: 5′ TTTTTAGATCTGCTGTGATCACAGGGGCC 3′
P4: 5′ TTTTTCTCGAGCTAAAAATTGATGTTCTTCAAGTC 3′

[0988] TANGO 266 was amplified with P1 (contains EcoRI site and Kozak sequence) and P2 (contains XhoI site) and cloned in frame into the EcoRI and XhoI sites of the pMEAP3 vector 5′ of alkaline phosphatase (TANGO 266-AP). Using the same sites TANGO 266 was also cloned into pcDNA3.1 containing either the sequence encoding for the Fc part of hIgG1 or a FLAG epitope adding the Fc (TANGO 266-Fc) or Flag (TANGO 266-Flag) sequence in frame to the 3′ end of TANGO 266. Oligos P3 and P4 were used to clone TANGO 266 (without signal peptide) into the Bgl II and XhoI cloning sites of plasmid APTag3, 3′ of alkaline phosphatase and in frame (AP-TANGO 266).

[0989] Production of Anti-TANGO 266 Antibody

[0990] Polyclonal anti-TANGO 266 was produced in rabbits using the peptide PLGREGEECHPGSHK. Antibody was peptide affinity purified from 12 week bleeds.

[0991] Protein Secretion Assay

[0992] The sequenced DNA constructs were transiently transfected into HEK 293T cells in 150 mM plates using Lipofectamine (GIBCO/BRL) according to the manufacturer's protocol. 72 hours post-transfection, the serum-free conditioned media (OptiMEM, Gibco/BRL) were harvested, spun and filtered. Alkaline phosphatase activity in conditioned media was quantitated using an enzymatic assay kit (Phospalight) according to the manufacturer's instructions. Conditioned medium samples were analyzed by SDS-PAGE followed by Western blot using polyclonal anti-peptide antibodies to TANGO 266 as described previously.

[0993] Isolation of the TANGO 266-Fc was performed with a one step purification scheme utilizing the affinity of the human IgG1 Fc domain to Protein A. The conditioned media was passed over a POROS A column (4.6×100 mm, PerSeptive Biosystems); the column was then washed with PBS, pH 7.4 and eluted with 200 mM glycine, pH 3.0. Samples were dialyzed against PBS, pH 7.4 at 4° C. with constant stirring. The buffered exchanged material was then sterile filtered (0.2 micrometers, Millipore) and frozen at −80° C.

### Example 3

[0994] TANGO 266 Tissue Distribution

[0995] Total RNA was prepared from various human tissues by a single step extraction method using RNA STAT-60 according to the manufacturer's instructions (TelTest, Inc). Each RNA preparation was treated with DNase I (Ambion) at 37° C. for 1 hour. DNAse I treatment was determined to be complete if the sample required at least 38 PCR amplification cycles to reach a threshold level of flourescence using β-2 microglobulin as an internal amplicon reference. The integrity of the RNA samples following DNase I treatment was confirmed by agarose gel electrophoresis and ethidium bromide staining. After phenol extraction cDNA was prepared from the sample using the SuperScript™ Choice System following the manufacturer's instructions (GibcoBRL). A negative control of RNA without reverse transcriptase was mock reverse transcribed for each RNA sample.

[0996] Expression was measured by TaqMan® quantitative PCR (Perkin Elmer Applied Biosystems) in cDNA prepared from the following normal human tissues: cecum, colon ascending, colon descending, colon transverse, duodenum, esophagus, ileocecum, ileum, jejunum, liver, rectum, stomach, heart, kidney, liver, pancreas, placenta, skeletal muscle, ovary, prostate, small intestine, testis, and adrenal tissue.

[0997] Each TANGO 266 gene probe was labeled using FAM (6-carboxyfluorescein), and the β2-microglobulin reference probe was labeled with a different fluorescent dye, VIC (forward and reverse primers, and TaqMan probe, were designed by PrimerExpress software (PE Biosystems) based on the sequence of each gene). The differential labeling of the target gene and internal reference gene thus enabled measurement in the same well. Forward and reverse primers and the probes for both β2-microglobulin and target gene were added to the TaqMan® Universal PCR Master Mix (PE Applied Biosystems). Although the final concentration of primer and probe could vary, each was internally consistent within a given experiment. A typical experiment contained 200 nM of forward and reverse primers plus 100 nM probe for β-2 microglobulin and 600 nM forward and reverse primers plus 200 nM probe for the target gene. TaqMan matrix experiments were carried out on an ABI PRISM 7700 Sequence Detection System (PE Applied Biosystems).

[0998] The following method was used to quantitatively calculate gene expression: The threshold cycle (Ct) value was defined as the cycle at which a statistically significant increase in flourescence was detected. A lower Ct value was indicative of a higher mRNA concentration. The Ct value of the kinase gene was normalized by subtracting the Ct value of the β-2 microglobulin gene to obtain a Ct value using the following formula: Δct=Ct kinase−Ct β-2 microglobulin. Expression was then calibrated against a cDNA sample showing a comparatively low level of expression of the kinase gene. The ΔCt value for the calibrator sample was then subtracted from _{Δ}Ct for each tissue sample according to the following formula: ₆₆ Ct=_{Δ}Ct-sample−_{Δ}Ct-calibrator. Relative expression was then calculated using the arithmetic formula given by 2^{-ΔΔct}.

[0999] TANGO 266 gene expression was as follows: No expression was detected in colon ascending, colon descending, colon transverse, duodenum, esophagus, ileocecum, ileum, jejunum, liver, rectum, stomach, kidney, liver, and pancreas. Trace levels of expression were detected in small intestine, which shall serve as the baseline level of expression, relative to which other levels are compared. Skeletal muscle, heart, and prostate reveal levels of expression about five times greater than the level of expression in small intestine. Cecum, placenta, and adrenal tissue reveal levels of expression about 40-50 times greater than the level of expression in small intestine. Testis revealed a level of expression about 250 times stronger than the level of expression in small intestine, and in ovary the expression was about 500 times stronger than the level of expression in small intestine.

### Example 4

[1000] Screening of Mouse Tissues for TANGO 266 Binding Sites

[1001] To identify potential sites of action of TANGO 266, mouse tissues sections were screened for binding sites using TANGO 266 alkaline phosphatase fusion proteins. Alkaline phosphatase was fused in frame either to the N-terminus (AP-TANGO 266) or the C-terminus (TANGO 266-AP) of TANGO 266. Binding of TANGO 266-AP (as well as AP-TANGO 266) to scattered cells in bone marrow and in the red pulp of spleen was detected. Alkaline Phosphatase (AP) by itself was used as control and did not bind to spleen and bone marrow. The morphology of cells bound by TANGO 266 was reminiscent of cells of the monocyte/macrophage lineage and prompted an analysis of the binding of TANGO 266 to isolated bone marrow derived macrophages. TANGO 266-AP, but not AP by itself, bound to macrophages cultured in vitro for 3 days in the presence of M-CSF (macrophage colony stimulating factor). The binding studies were performed as follows. The isolation of bone marrow derived macrophages is also described below:

[1002] Binding studies using alkaline phosphatase fusion proteins were done as described in Cheng and Flanagan, Cell 79:157-168. Briefly, 8 μM cyrostat sections were prepared from tissues embedded in OCT and frozen in liquid nitrogen. Sections were thawed, washed once in HBHA (Hank's balanced salt solution supplemented with 20 mM Hepes, pH 7, 0.05% BSA and 0.1% sodium azide) and incubated with alkaline phospatase fusion proteins for one hour in a humidified chamber. Sections were washed 6 times in HBHA, fixed in acetone/paraformaldehyde, washed 3× in HBS (20 mM Hepes, pH 7.5, 150 mM NaCl) and developed using BCIP/NBT substrate solution (100 mM Tris-HCl, pH 9.5, 100 mM NaCl, 5 mM MgCl, 0.17 mg/ml BCIP and 0.33 mg/ml NBT).

[1003] Bone marrow derived macrophages were obtained by culturing nucleated bone marrow cells (see the following section) with 50 ng/ml M-CSF on cover slips in 6-well plates. After three days, non-adherent cells were removed and adherent cells on cover slips were fixed in acetone and air-dried.

### Example 5

[1004] Analysis of the Effect of TANGO 266 on Mononuclear Bone Marrow Cells

[1005] The results of the binding studies also prompted an analysis of the effect of purified TANGO 266-Fc on mononuclear bone marrow cells. Cells were cultured in the presence of TANGO 266-Fc for three days and mitogenic activity was measured by ³H thymidine incorporation. TANGO 266-Fc was shown to induce a concentration-dependent increase in the mitogenic response. Maximal ³H thymidine incorporation was detected at about 1500 ng/ml. A control-Fc fusion protein had no effect on the mitogenic response making it unlikely that the Fc part of the protein is responsible for the observed effect. Moreover, heat inactivation of TANGO 266-Fc (10 min at 95 degrees Celsius) abolished the mitogenic response ruling out the possibility that the functional response elicited by TANGO 266-Fc is due to endotoxin contamination in the protein preparation.

[1006] Culturing of mononuclear bone marrow cells (described below) in the presence of TANGO 266-Fc not only resulted in a mitogenic response but also in morphological changes. Large numbers of adherent cells of macrophage-like morphology were observed in cultures treated with 266-Fc but only few if any adherent cells were detected in cultures treated with culture medium only, control-Fc or heat-inactivated TANGO 266-Fc. Immuno-fluorescence analysis (discussed briefly below) showed that the adherent cell population was positive for Mac-1, a marker specific for the myeloid lineage and F4/80, a marker specific for macrophages indicating that the adherent cells are macrophages. This was further confirmed by FACS analysis using a range of different lineage markers. The adherent cell population stimulated by TANGO 266-Fc is Macl+, F4/80+, Gr-1 low, B220- and CD3-. In summary, the above data show that TANGO 266-Fc stimulates a mitogenic response in mononuclear bone marrow cells, and the proliferation and differentiation of macrophages.

[1007] Culturing Bone Marrow Cells

[1008] Bone marrow was harvested from femurs of 4 to 6 week old C57BL6 mice and passed over a mouse density centrifugation medium (LympolyteM, Cedarlane laboratories, Ontario) to isolate nucleated cells. For the 3H thymidine incorporation assay, 0.5 to 1×105 nucleated cells were incubated in a total volume of 0.2 ml in individual of 96-well plates containing dilutions of TANGO 266 for 72 h. The culture medium used was McCoy's 5A mdium supplemented with 15% fetal calf serum and antibiotics. During the last 6 hours of culture, cells were pulse labeled with 0.5 μCi 3H thymidine (5 Ci/mmol sp. act.) and 3H thymidine incorporation was quantified by scintillation counting as described.

[1009] Flow cytometry and Immuno-fluorescence

[1010] For flow cytometry analysis cultures were set up in 6-well plates. Adherent cells were detached in Versene, washed and then incubated for 60 min with 10 μg/ml of the FITC-conjugated marker antibodies. Cells were then washed and analyzed with a FACSCaliber flow cytometer. For in situ fluorescence analysis adherent cells grown on chamberslides were fixed in acetone, washed in PBS and incubated for 60 minutes with FITC-conjugated marker antibodies in a humidified staining chamber. Slides were washed in PBS, mounted with cover slips and analyzed under a fluorescence microscope.

### Example 6

[1011] In vivo TANGO 266 Expression

[1012] To study the consequences of TANGO 266 expression in vivo (described below), we overexpressed TANGO 266 in the hematopoietic system of mice. To this end, hematopoietic progenitor cells from SJL mice were transduced with a retroviral vector carrying TANGO 266 (MSP-TANGO 266) or an empty control vector pMSCVpac (MSP). Transduced cells were then transplanted into sublethally irradiated C57B16 mice and allowed to reconstitute the hematopietic system. Two months after transplant, animals were sacrificed. Blood, bone marrow and spleen were analyzed by flow cytometry with different hematopoietic lineage markers including B220, IgD, CD3, NK1.1, Mac1, Gr-1 and F4/80. CD45.1, a marker specific for donor derived cells, was used as an indicator for the reconstitution efficiency.

[1013] The reconstitution efficiency was similar for all animals (about 90%). No differences in the distribution of the hematopoietic lineages were seen in blood and bone marrow between mice reconstituted with MSP-TANGO 266 transduced bone marrow (MSP-TANGO 266 mice) versus mice reconstituted with MSP transduced bone marrow (MSP mice). However, whereas the distribution of B220+, CD3+, NK1.1+and Gr-1 positive cells was similar in the spleen of MSP-TANGO 266 mice and MSP mice, a higher percentage of Mac1/F4/80 double positive cells was observed in the spleen of MSP-TANGO 266 mice. This Mac1/F4/80 double positive population was hardly detectable in MSP control animals but was clearly visible in MSP-TANGO 266 animals. MacI expression was higher on this population compared to the F4/80 negative population. These results indicate that overexpression of TANGO 266 in the hematopoietic system in mice results in an increase of macrophages in the spleen.

[1014] In vivo animal studies

[1015] The full length human TANGO 266 cDNA was cloned into pMSCVpac (MSP), a virus containing a PGK promoter driven the puromycin resistance gene. Control virus was the empty virus. The viruses were produced in the 293-EBNA cells by transfecting the retroviral plasmid with two PN8e vectors, one containing the gag/pol construct, PN8e gagpol, from the mouse moloney leukemia virus (MMLV) and the other the VSV-G envelop, PN8e VSV-G. Viral supernatants were collected 48 hours, 72 hours and 96 hours after transfection, filtered and centrifuged at 4C at 50,000× g (25,000 rpm) for 2 hr. Concentrated virus pellets were resuspended in culture medium, shaken and frozen at −80° C. until transduction.

[1016] Donor mouse bone marrow cells were collected 4 days after treatment with 5-fluorouracil (5-FU), immunopurified for CD3e, CD11b, CD45R and Ly-6G negative cells, prestimulated for two days, infected for one day with the viral supernatant in the presence of recombinant mouse interleukin-3, recombinant mouse interleukin-6 (rmIL6), recombinant mouse stem cell factor (rmSCF), recombinant mouse fins-like tyrosine kinase-3 ligand (rmFlt-3L) and mouse thrombopoietin (mTPO) and then collected and injected into lethally irradiated recipient mice.

### Example 8

[1017] Analysis of Progenitor Cells to Determine TANGO 266 Effect

[1018] In recent years culture conditions have been developed that allow human bone marrow CD34+ progenitors to expand in vitro and to differentiate into antigen presenting cells. (Zandstra, P. W., et al (1997). Proc. Natl. Acad. Sci. USA 94, 4698-4703; Bhatia, M. et al. (1997) J. Exp. Med. 186, 619-624; and Banchereau, J., & Steinman, R. M. (1998) Nature 392, 245-252.) CD34+ human bone marrow cells were cultured in serum free media in the presence of Flt-3 ligand, SCF, IL-3 and IL-6 in the presence or absence of TANGO 266-Fc. Under these conditions, total cell numbers in cytokines alone or with a control Fc fusion protein increased 200-400 fold. TANGO 266-Fc increased the proportion of adherent cells in expanded human bone marrow CD34+ cell cultures in a dose dependent manner. The morphology of the adherent cells was suggestive of cells differentiating into the monocyte/macrophage lineage.

[1019] Cells were assessed for stage of differentiation using CD34, an early hematopoietic progenitor marker, and CD14 and CD16 which are expressed by cells that have differentiated into the monocyte/macrophage lineage. CD14 is a functional receptor on cells of the monocytic lineage for bacterial lipopolysaccharide, and for clearance and phagocytosis of apoptotic cells. The addition of TANGO 266-Fc increased the number of cells expressing CD16. The addition of TANGO 266-Fc greatly decreased the percentage of CD34+/CD14− cells, and increased CD34−/CD14+ cells after 14 days of culture, suggesting that TANGO 266 acts on early progenitors to induce differentiation into the monocyte lineage. This affect was not evident in media alone, with a control Fc fusion protein, or with heat inactivated TANGO 266-Fc. Total cell number after 2 weeks in culture increased 1.5-2.2 fold compared to media alone or in presence of a control Fc protein. The total number of CD34+ cells in culture dropped 10 fold, with a concomitant 3 fold increase in the number of CD14+ cells when cultured in the presence of 200 ng ml⁻¹ TANGO 266-Fc compared to a control Fc. This effect was seen in a dose dependent manner in a range of 1-500 ng ml⁻¹ when cultured for a 2 week period. The human bone marrow cell culture and analysis is described as follows:

[1020] Human Bone Marrow CD34+Cell Culture and Analysis

[1021] Adult human bone marrow cells selected for expression of CD34 were purchased from Purecell (Foster City, Calif.). Cells (4×103 ml⁻¹) were cultured for 14 days in serum free media containing cytokines (StemCell Tech., Vancouver, B.C., Canada) Flt-3 ligand (100 ng ml⁻¹), SCF (100 ng ml⁻¹), IL-3 (10 ng ml⁻¹) and IL-6 (10 ng ml⁻¹) in a humidified 5%CO₂ incubator at 37° C. Non adherent cells were collected and adherent cells removed by with a cell lifter after incubation in Versene (Gibco/BRL, Grand Island, N.Y.), washed and blocked with 1 mg ml⁻¹ human gamma globulin (Gamimune; Miles Inc, Elkhart, Ind.). Total viable cell count was determined by trypan blue exclusion. Fluorescein isothiocyanate (FITC) labeled anti-CD14 and anti-CD16, and phycoerythrin (PE) labeled anti-CD34 were obtained from Pharmingen. After dilution in PBS cells were analyzed by FACSCaliber flow cytometer (Becton Dickinson, Franklin Lakes, N.J.).

### Example 9

[1022] Mapping Results of TANGO 266

[1023] The TANGO 266 nucleic acid sequence bears homology to a marker called SHGC-16135, which is known to map to 1p21. 1p21 is a locus for a disorder known as osteopetrosis, autosomal dominant, type II, the mapping of which was discovered during a study of an extended family with type II disorder (Van Hul, W. et al (1997) Medizinische Genetik 9: 8). In the study, linkage between the disorder and to microsatellite markers in the 1p21 region was demonstrated. The chromosomal region was further analyzed, within which was discovered the gene for macrophage colony stimulating factor (CSF1), a hematopoietic growth factor that plays an important role in the proliferation of macrophages and osteoclasts from hematopoietic stem cells. Refined mapping appeared to exclude CSF1 as the site of the mutation in the subject family.

[1024] Uses of TANGO 266 Nucleic Acids, Polypeptides, and Modulators Thereof

[1025] The TANGO 266 proteins and nucleic acid molecules of the invention have at least one “TANGO 266 activity” (also referred to herein as “TANGO 266 biological activity”). TANGO 266 activity refers to an activity exerted by a TANGO 266 protein or nucleic acid molecule on a TANGO 266 responsive cell in vivo or in vitro. Such TANGO 266 activities include at least one or more of the following activities: 1) interaction of a TANGO 266 protein with a TANGO 266-target molecule; 2) activation of a TANGO 266 target molecule; 3) modulation of cellular proliferation; 4) modulation of cellular differentiation; or 5) modulation of a signaling pathway. Thus, the TANGO 266 proteins, nucleic acids and/or modulators can be used for the treatment of a disorder characterized by aberrant TANGO 266 expression and/or an aberrant TANGO 266 activity, such as proliferative and/or differentiative disorders.

[1026] As cytokines are often found in snake venom, and due to TANGO 266's significant homology to venom protein A (VPRA), found in high abundance in the venom of the black mamba (see experimental section), TANGO 266 may be a cytokine. In the same fashion as a cytokine, TANGO 266 has been shown to play a role in the proliferation and differentiation of cells, e.g., macrophages and monocytes, and can therefore be used to treat proliferative and cell differentiation-related disorders. Such proliferative disorders include but are not limited to e.g., carcinoma, e.g., lymphoma, e.g., follicular lymphoma. Due to its ability to induce the proliferation and differentiation of white blood cell types, e.g., macrophages and monocytes, TANGO 266 polypeptides, nucleic acids, and/or modulators thereof, can be used to treat can be used to treat include immune disorders, e.g., viral disorders (e.g., infection by HSV), cell growth disorders, e.g., cancers (e.g., carcinoma, lymphoma, e.g., follicular lymphoma), autoimmune disorders (e.g., arthritis, graft rejection (e.g., allograft rejection), T cell disorders (e.g., AIDS)) and inflammatory disorders (e.g., bacterial infection, psoriasis, septicemia, cerebral malaria, inflammatory bowel disease, arthritis (e.g., rheumatoid arthritis, osteoarthritis), and allergic inflammatory disorders (e.g., asthma, psoriasis)).

[1027] Furthermore, TANGO 266 polypeptides, nucleic acids, and/or modulators thereof, can be used to treat disorders associated with leukocytes, e.g., with monocytes, macrophages, lymphocytes, and granulocytes, such as leukopenias (e.g., neutropenia, monocytopenia, lymphopenia, and granulocytopenia), leukocytosis (e.g., granulocytosis, lymphocytosis, eosinophilia, monocytosis, acute and chronic lymphadenitis), malignant lymphomas (e.g., Non-Hodgkin's lymphomas, Hodgkin's lymphomas, leukemias, agnogenic myeloid metaplasia, multiple myeloma, plasmacytoma, Waldrenström's macroglobulinemia, heavy-chain disease, monoclonal gammopathy, histiocytoses, eosinophilic granuloma, and angioimmunoblastic lymphadenopathy).

[1028] Due to its ability to induce the proliferation and differentiation of white blood cell types, e.g., macrophages and monocytes, TANGO 266 polypeptides, nucleic acids, and/or modulators thereof, can be used to treat hematopoeitic disorders.

[1029] For example, hematopoeitic disorders that TANGO 266 polypeptides, nucleic acids, and/or modulators thereof can be used to treat include disorders associated with abnormal monocyte and/or macrophage function, such as impaired phagocytosis, chemotaxis, or secretion of cytokines, growth factors and acute-phase reactants, resulting from certain diseases, e.g., lysosomal storage diseases (e.g., Gaucher's disease); impaired monocyte cytokine production, for example, found in some patients with disseminated nontuberculous mycobacterial infection who are not infected with HIV; leukocyte adhesion deficiency (LAD), hyperimmunoglobulin E-recurrent infection (HIE) or Job's syndrome, Chédiak-Higashi syndrome (CHS), and chronic granulomatous diseases (CGD), certain autoimmune diseases, such as systemic lupus erythematosus and other autoimmune diseases characterized by tissue deposition of immune complexes, as seen in Sjögren's syndrome, mixed cryoglobulinemia, dermatitis herpetiformis, and chronic progressive multiple sclerosis. Also included are disorders or infections that impair mononuclear phagocyte function, for example, influenza virus infection and AIDS.

[1030] Monocyte associated disorders include monocytoses such as, for example, monocytoses associated with certain infections such as tuberculosis, brucellosis, subacute bacterial endocarditis, Rocky Mountain spotted fever, malaria, and visceral leishmaniasis (kala azar), in malignancies, leukemias, myeloproliferative syndromes, hemolytic anemias, chronic idiopathic neutropenias, and granulomatous diseases such as sarcoidosis, regional enteritis, and some collagen vascular diseases.

[1031] Other monocyte associated disorders include monocytopenias such as, for example, monocytopenias that can occur with acute infections, with stress, following administration of glucocorticoids, aplastic anemia, hairy cell leukemia, and acute myelogenous leukemia and as a direct result of administration of myelotoxic and immunosuppressive drugs.

[1032] As TANGO 266 is expressed in the spleen library, TANGO 266 nucleic acids, proteins, and/or modulators thereof can be used to modulate the proliferation, differentiation, and/or function of cells that form the spleen, e.g., cells of the splenic connective tissue, e.g., splenic smooth muscle cells and/or endothelial cells of the splenic blood vessels. TANGO 266 nucleic acids, proteins, and modulators thereof can also be used to modulate the proliferation, differentiation, and/or function of cells that are processed, e.g., regenerated or phagocytized within the spleen, e.g., erythrocytes and/or B and T lymphocytes and macrophages. Thus TANGO 266 nucleic acids, proteins, and modulators thereof can be used to treat spleen, e.g., the fetal spleen, associated diseases and disorders. Examples of splenic diseases and disorders include e.g., splenic lymphoma and/or splenomegaly, and/or phagocytotic disorders, e.g., those inhibiting macrophage engulfment of bacteria and viruses in the bloodstream.

[1033] As TANGO 266 is expressed in the heart, TANGO 266 nucleic acids, proteins, and modulators thereof can be used to treat heart disorders as described herein.

[1034] As TANGO 266 is expressed in the pituitary, TANGO 266 polypeptides, nucleic acids, and/or modulators thereof, can be used to treat disorders of the pituitary gland. The pituitary secretes such hormones as thyroid stimulating hormone (TSH), follicle stimulating hormone (FSH), adrenocotropic hormone (ACTH), and others. It controls the activity of many other endocrine glands (thyroid, ovaries, adrenal, etc.). For example, such molecules can be used to treat or modulate pituitary related disorders including, without limitation, acromegaly, Cushing's syndrome, craniopharyngiomas, Empty Sella syndrome, hypogonadism, hypopituitarism, and hypophysitis, in addition to disorders of the endocrine glands the pituitary controls.

[1035] As TANGO 266 is expressed in the thyroid, TANGO 266 polypeptides, nucleic acids, and/or modulators thereof, can be used to treat disorders of the thyroid gland, such as hyperthyroidism (e.g., diffuse toxic hyperplasia, toxic multinodular goiter, toxic adenoma, and acute or subacute thyroiditis), hypothyroidism (e.g., cretinism and myxedema), thyroiditis (e.g., Hashimoto's thyroiditis, subacute granulomatous thyroiditis, subacute lymphocytic thyroiditis, Riedel's thryroiditis), Graves' disease, goiter (e.g., simple diffuse goiter and multinodular goiter), or tumors (e.g., adenoma, papillary carcinoma, follicular carcinoma, medullary carcinoma, undifferentiated malignant carcinoma, Hodgkin's disease, and non-Hodgkin's lymphoma).

[1036] As TANGO 266 is expressed in adrenal tissue, e.g., in adrenal medulla and adrenal cortex, TANGO 266 polypeptides, nucleic acids, and/or modulators thereof, can be used to treat disorders of the adrenal cortex, such as hypoadrenalism (e.g., primary chronic or acute adrenocortical insufficiency, and secondary adrenocortical insufficiency), hyperadrenalism (Cushing's syndrome, primary hyperaldosteronism, adrenal virilism, and adrenal hyperplasia), or neoplasia (e.g., adrenal adenoma and cortical carcinoma). In another example, TANGO 266 polypeptides, nucleic acids, and/or modulators thereof, can be used to treat disorders of the adrenal medulla, such as neoplasms (e.g., pheochromocytomas, neuroblastomas, and ganglioneuromas).

[1037] As TANGO 266 is expressed in gonadal tissue, TANGO 266 polypeptides, nucleic acids and/or modulators thereof can be used to modulate the function, morphology, proliferation and/or differentiation of cells in the reproductive tract, particularly in the ovaries and testis.

[1038] For example, the TANGO 266 polypeptides, nucleic acids and/or modulators thereof can be used to treat or modulate disorders associated with the testis including, without limitation, the Klinefelter syndrome (both the classic and mosaic forms), XX male syndrome, variococele, germinal cell aplasia (the Sertoli cell-only syndrome), idiopathic azoospermia or severe oligospermia, crpytochidism, and immotile cilia syndrome, or testicular cancer (primary germ cell tumors of the testis). In another example, TANGO 266 polypeptides, nucleic acids, and/or modulators thereof, can be used to treat testicular disorders, such as unilateral testicular enlargment (e.g., nontuberculous, granulomatous orchitis), inflammatory diseases resulting in testicular dysfunction (e.g., gonorrhea and mumps), and tumors (e.g., germ cell tumors, interstitial cell tumors, androblastoma, testicular lymphoma and adenomatoid tumors).

[1039] For example, the TANGO 266 polypeptides, nucleic acids and/or modulators thereof can be used modulate the function, morphology, proliferation and/or differentiation of the ovaries. For example, such molecules can be used to treat or modulate disorders associated with the ovaries, including, without limitation, ovarian tumors, McCune-Albright syndrome (polyostotic fibrous dysplasia). In another example, TANGO 266 polypeptides, nucleic acids, and/or modulators thereof, can be used to treat ovarian disorders, such as ovarian endometriosis, non-neoplastic cysts (e.g., follicular and luteal cysts and polycystic ovaries) and tumors (e.g., tumors of surface epithelium, germ cell tumors, ovarian fibroma, sex cord-stromal tumors, and ovarian cancers (e.g., metastatic carcinomas, and ovarian teratoma). For example, the TANGO 266 polypeptides, nucleic acids and/or modulators can be used in the treatment of infertility.

[1040] The TANGO 266 polypeptides, nucleic acids and/or modulators thereof can additionally be used to modulate the function, morphology, proliferation and/or differentiation of cells in the tissues of the reproductive tract other than the ovaries and testis. For example, such molecules can be used to treat or modulate disorders associated with the female reproductive tract including, without limitation, uterine disorders, e.g., hyperplasia of the endometrium, uterine cancers (e.g., uterine leiomyomoma, uterine cellular leiomyoma, leiomyosarcoma of the uterus, malignant mixed mullerian Tumor of uterus, uterine Sarcoma), and dysfunctional uterine bleeding (DUB).

[1041] As TANGO 266 is expressed in the placenta, TANGO 266 polypeptides, nucleic acids, and/or modulators thereof, can be used to treat placental disorders, such as toxemia of pregnancy (e.g., preeclampsia and eclampsia), placentitis, or spontaneous abortion.

[1042] As TANGO 266 maps to the same region as the locus for osteopetrosis, autosomal dominant, type II, and as both macrophages and osteoclasts are derived from the same progenitor cell type, e.g., monocytes, TANGO 266 polypeptides, nucleic acids and/or modulators thereof can be used to modulate the function, morphology, proliferation and/or differentiation of bone and cartilage cells, e.g., osteoclasts, osteoclasts, and chondrocytes. Thus TANGO 266 polypeptides, nucleic acids and/or modulators thereof can be used to treat bone disorders, including but not limited to bone cancer, achondroplasia, osteopetrosis (e.g., osteopetrosis, autosomal domainant, type II), myeloma, fibrous dysplasia, scoliosis, osteoarthritis, osteosarcoma, osteoporosis, and bone and/or cartilage injury due to for example, trauma (e.g., bone breakage, cartilage tearing), degeneration (e.g. osteoporosis), degeneration of joints, e.g., arthritis, e.g., osteoarthritis, and bone wearing.

[1043] Tango 267

[1044] In another aspect, the present invention is based on the discovery of nucleic acid sequences which encode a novel family of proteins referred to herein as TANGO 267 proteins. Described herein is a human TANGO 267 nucleic acid molecule and the corresponding protein which the nucleic acid molecule encodes.

[1045] An TANGO 267 family member can also include a MAGE-like domain. The MAGE-like domain typically includes about 50 to 250, preferably about 75 to 225, more preferably about 120 to 200, still more preferably about 150 to 180 amino acid residues in length. The MAGE-like cytoplasmic domain typically has the following consensus sequence: [L-Xaa(6)-L-V-Xaa(2)-L-Xaa(2)-K-Xaa(n1)-E-M-L-Xaa(n2)-F-G-Xaa(2)-L-K-E-Xaa-D-Xaa(n3)-G-L-L], wherein L is leucine, Xaa is any amino acid, V is valine, K is lysine, n1 is about 2-15, preferably 5-12, and more preferably 10, E is glutamate, M is methionine, n2 is about 10-40, preferably 15-30, and more preferably 25, F is phenylalanine, G is glycine, D is aspartate, and n3 is 15-40, preferably 20-32, and more preferably 27-28.

[1046] Human TANGO 267

[1047] A sequence encoding human TANGO 267 was identified by screening a human coronary artery smooth muscle cell by EST analysis. The 2925 nucleotide human TANGO 267 sequence (FIGS. 79A-79C; SEQ ID NO: 65) includes an open reading frame which extends from nucleotide 161 to nucleotide 2494 of SEQ ID NO: 65 and encodes a 778 amino acid transmembrane protein depicted in SEQ ID NO: 66.

[1048] In another embodiment, a human TANGO 267 clone includes comprises a 2739 nucleotide cDNA. The open reading frame of this cDNA comprises nucleotides 171 to 2507, and encodes a transmembrane protein comprising a 778 amino acid polypeptide.

[1049] In one embodiment of a nucleotide sequence of human TANGO 267 the nucleotide at position 211 is a guanine (G). In this embodiment, the amino acid at position 17 is glutamate (E). In another embodiment of a nucleotide sequence of human TANGO 267, the nucleotide at position 211 is a cytosine (C). In this embodiment, the amino acid at position 17 is aspartate (D). In another embodiment of a nucleotide sequence of human TANGO 267, the nucleotide at position 223 is an adenine (A). In this embodiment, the amino acid at position 21 is a glutamate (E). In another embodiment of a nucleotide sequence of human TANGO 267, the nucleotide at position 223 is a cytosine (C). In this embodiment, the amino acid at position 21 is aspartate (D). In another embodiment of a nucleotide sequence of human TANGO 267, the nucleotide at position 256 is a guanine (G). In this embodiment, the amino acid at position 32 is a glutamate (E). In another embodiment of a nucleotide sequence of human TANGO 267, the nucleotide at position 256 is a cytosine (C). In this embodiment, the amino acid at position 32 is aspartate (D).

[1050] Another embodiment of the invention includes isolated nucleic acid molecules comprising a polynucleotide having a nucleotide sequence encoding the polypeptide having the human TANGO 267 amino acid sequence in SEQ ID NO: 66, but lacking the N-terminal methionine residue. In this embodiment, human TANGO 267 (nucleotides 164-2494 of SEQ ID NO: 65) encodes the human TANGO 267 amino acid sequence from amino acids 2-778 of SEQ ID NO: 66.

[1051] Human TANGO 267 protein has a molecular weight of 86.2 kD prior to post-translational modification. The presence of a methionine residue at positions 5, 27, 31, 62, 144, 205, 483, 497, 572, 589, 645, 667, and 694 indicate that there can be alternative forms of human TANGO 267 of 774 amino acids, 752 amino acids, 748 amino acids, 717 amino acids, 635 amino acids, 574 amino acids, 296 amino acids, 282 amino acids, 207 amino acids, 190 amino acids, 134 amino acids, 112 amino acids and 83 amino acids of SEQ ID NO: 66, respectively.

[1052] A clone, EpT267, which encodes human TANGO 267 was deposited with the American Type Culture Collection (ATCC(D, 10801 University Boulevard, Manassas, Va. 20110-2209) on Mar. 26, 1999, and assigned Accession Number 207176. This deposit will be maintained under the terms of the Budapest Treaty on the International Recognition of the Deposit of Microorganisms for the Purposes of Patent Procedure. This deposit was made merely as a convenience for those of skill in the art and is not an admission that a deposit is required under 35 U.S.C. §112.

[1053] The present invention also includes TANGO 267 proteins having a transmembrane domain. As used herein, a transmembrane domain refers to an amino acid sequence having at least about 25 to about 40 amino acid residues in length and which contains at least about 65-70% hydrophobic amino acid residues such as alanine, leucine, isoleucine, phenylalanine, proline, tyrosine, tryptophan, or valine. In a preferred embodiment, a transmembrane domain contains at least about 30-35 amino acid residues, preferably about 30-35 amino acid residues, and has at least about 60-80%, more preferably 65-75%, and more preferably at least about 68% hydrophobic residues. An example of a transmembrane domain includes from about amino acids 559 to 575 of TANGO 267.

[1054] In one embodiment, human TANGO 267 includes extracellular domains at amino acids 1 to 558 of SEQ ID NO: 66 and amino acids 773 to 778 of SEQ ID NO: 66, transmembrane (TM) domains at amino acids 559 to 575 and amino acids 749 to 772 of SEQ ID NO: 66; and a cytoplasmic domain at amino acids 576 to 748 of SEQ ID NO: 66.

[1055] Alternatively, in another embodiment, a human TANGO 267 protein contains an extracellular domain at amino acid residues 576 to 748 of SEQ ID NO: 66, transmembrane domains at amino acid residues 147 to 170 and amino acid residues 749 to 772 of SEQ ID NO: 66, cytoplasmic domains at amino acid residues 1 to 558 of SEQ ID NO: 66 and amino acid residues 743 to 778 of SEQ ID NO: 66.

[1056] The human gene for TANGO 267 was mapped on radiation hybrid panels to the long arm of chromosome X, in the region q12. Flanking markers for this region are WI-5587 and WI-5717. The AR (androgen receptor), MSN (moesin), and OPHN (oligophrenin 1) genes also map to this region of the human chromosome. This region is syntenic to mouse chromosome X. The gs (greasy) loci also maps to this region of the mouse chromosome. The ar (androgen receptor) and sla (sex linked anemia) genes also map to this region of the mouse chromosome.

[1057] Human TANGO 267 appears to be expressed in a wide range of tissues based on EST origin.

[1058] Human TANGO 267 protein bears similarity to a human MAGE-like protein (hepatocellular carcinoma associated gene JCL-1; GenBank Accession Numbers Z98046 and U92544). Human MAGE proteins (Kirkin et al. (1998) APMIS 106:665-79) are melanoma associated antigens recognized by cytotoxic T lymphocytes. It has low immunogenicity. These proteins are potentially useful targets for tumor vaccines. FIGS. 80A-80D depicts the alignment of the amino acid sequence of human TANGO 267 and human MAGE-like protein. In this alignment, a (•) between the two sequences indicates an exact match.

[1059] Uses of TANGO 267 Nucleic Acids, Polypeptides and Modulators Thereof

[1060] The TANGO 267 proteins and nucleic acid molecules of the invention have at least one “TANGO 267 activity” (also referred to herein as “TANGO 267 biological activity”). TANGO 267 activity refers to an activity exerted by a TANGO 267 protein or nucleic acid molecule on a TANGO 267 responsive cell in vivo or in vitro. Such TANGO 267 activities include at least one or more of the following activities: 1) interaction of a TANGO 267 protein with a TANGO 267-target molecule; 2) activation of a TANGO 267 target molecule; 3) modulation of cellular proliferation; 4) modulation of cellular differentiation; or 5) modulation of a signaling pathway. Thus, the TANGO 267 proteins, nucleic acids and/or modulators can be used for the treatment of a disorder characterized by aberrant TANGO 267 expression and/or an aberrant TANGO 267 activity, such as proliferative and/or differentiative disorders.

[1061] As TANGO 267 was originally discovered in a coronary artery smooth muscle cell by EST analysis, TANGO 267 nucleic acids, proteins, and modulators thereof can be used to treat heart disorders, e.g., ischemic heart disease, atherosclerosis, hypertension, angina pectoris, Hypertrophic Cardiomyopathy, and congenital heart disease.

[1062] In another example, because human TANGO 267 protein bears similarity to a human MAGE-like protein (hepatocellular carcinoma associated gene JCL-1), TANGO 267 polypeptides, nucleic acids, or modulators thereof, can be used to treat hepatic (liver) disorders, such as jaundice, hepatic failure, hereditary hyperbiliruinemias (e.g., Gilbert's syndrome, Crigler-Naijar syndromes and Dubin-Johnson and Rotor's syndromes), hepatic circulatory disorders (e.g., hepatic vein thrombosis and portal vein obstruction and thrombosis) hepatitis (e.g., chronic active hepatitis, acute viral hepatitis, and toxic and drug-induced hepatitis) cirrhosis (e.g., alcoholic cirrhosis, biliary cirrhosis, and hemochromatosis), or malignant tumors (e.g., primary carcinoma, hepatoblastoma, and angiosarcoma).

[1063] Furthermore, because human TANGO 267 protein bears similarity to a human MAGE-like protein (hepatocellular carcinoma associated gene JCL-1), TANGO 216 polypeptides, nucleic acids and/or modulators thereof can also be used to modulate cell adhesion in proliferative disorders, such as cancer. Examples of types of cancers include benign tumors, neoplasms or tumors (such as carcinomas, sarcomas, adenomas or myeloid lymphoma tumors, e.g., fibrosarcoma, myxosarcoma, liposarcoma, chondrosarcoma, osteogenic sarcoma, chordoma, angiosarcoma, endotheliosarcoma, lymphangiosarcoma, lymphangioendotheliosarcoma, synovioma, mesothelioma, Ewing's tumor, leimyosarcoma, rhabdotheliosarcoma, colon sarcoma, pancreatic cancer, breast cancer, ovarian cancer, prostate cancer, squamous cell carcinoma, basal cell carcinoma, adenocarcinoma, sweat gland carcinoma, sebaceous gland carcinoma, papillary carcinoma, papillary adenocarcinomas, cystadenocarcinoma, medullary carcinoma, bronchogenic carcinoma, renal cell carcinoma, hematoma, bile duct carcinoma, melanoma, choriocarcinoma, semicoma, embryonal carcinoma, Wilms' tumor, cervical cancer, testicular tumor, lung carcinoma, small cell carcinoma, bladder carcinoma, epithelial carcinoma, glioma, astrocytoma, medulloblastoma, craniopharyngioma, ependynoma, pinealoma, hemangioblastoma, retinoblastoma), leukemias, (e.g. acute lymphocytic leukemia), acute myelocytic leukemia (myelolastic, promyelocytic, myelomonocytic, monocytic and erythroleukemia), chronic leukemias (chronic myelocytic (granulocytic) leukemia and chronic lymphocytic leukemia), or polycythemia vera, or lymphomas (Hodgkin's disease and non-Hodgkin's diseases), multiple myelomas and Waldenström's macroglobulinemia.

[1064] TANGO 267 could be useful as a target for tumor vaccines. Accordingly, TANGO 267 proteins (including fragments of TANGO 267) and nucleic acids and/or modulators can be used as tumor vaccines.

[1065] TANGO 253, TANGO 257, and INTERCEPT 258

[1066] The TANGO 253, TANGO 257, and INTERCEPT 258 proteins and nucleic acid molecules comprise families of molecules having certain conserved structural and functional features. For example, TANGO 253 proteins, TANGO 257 proteins and INTERCEPT 258 proteins of the invention have signal sequences.

[1067] In one embodiment, a TANGO 253 protein contains a signal sequence of about amino acids 1 to 15 or about amino acids 1 to 15 of SEQ ID NO: 68. The signal sequence is cleaved during processing of the mature protein.

[1068] In another embodiment, a TANGO 257 protein contains a signal sequence of about amino acids 1 to 21 or about amino acids 1 to 21 of SEQ ID NO: 72. The signal sequence is cleaved during processing of the mature protein.

[1069] In another embodiment, an INTERCEPT 258 protein contains a signal sequence at about amino acids 1 to 29 or about amino acids 1 to 29 of SEQ ID NO: 76. The signal sequence is cleaved during processing of the mature protein.

[1070] In one embodiment, TANGO 253 includes at least one RGD cell attachment site. An RGD domain contains a contiguous arginine-glycine-aspartic acid amino acid sequence and is involved in cell-cell, cell-extracellular matrix and cell adhesion interactions. In a preferred embodiment, a TANGO 253 family member has the amino acid sequence of SEQ ID NO: 68 and, preferably, a RGD cell attachment site is located at about amino acid positions 77 to 79 of SEQ ID NO: 68.

[1071] TANGO 253 family members can also include a collagen domain. As used herein, the term “collagen domain” refers to a protein domain containing a G-X-Y amino acid repeat motif, wherein the first amino acid residue is glycine and the second and third amino acid residues can be any residue but are preferably proline or hydroxyproline. Typically, a collagen domain contains at least about 3 to 5 G-X-Y repeats, and can contain about 3, 5, 8, 10, 12, 15, 20 or more continuous G-X-Y repeats. In one embodiment, a collagen domain can fold to form a triple helical structure.

[1072] In one embodiment, a TANGO 253 family member includes at least one collagen domain having an amino acid sequence that is at least about 40%, 50%, 60%, 70%, 80%, 90%, 95% or 98% identical to amino acids 36 to 95, which is the collagen domain of human TANGO 253, or amino acids 36 to 95, which is the collagen domain of mouse TANGO 253, while maintaining a glycine residue at the first position of G-X-Y repeats within the domain to maintain at least 3, 5, 8, 10, 12, 15 or 20 contiguous G-X-Y repeats, or while most preferably maintaining a glycine repeat at the first position of each G-X-Y repeat within the domain.

[1073] TANGO 253 family members can also include a C1q domain or at least one of the conserved amino acid motifs found therein. As used herein, the term “C1q domain” refers to a protein domain that bears homology to a C1q domain present within a member of the C1 enzyme complex. A C1q domain typically includes about 130-140 amino acid residues. C1q domains are utilized in processes involving, e.g., correct protein folding and alignment and protein-protein interactions.

[1074] In one embodiment, a TANGO 253 family member includes one or more C1q domains having an amino acid sequence that is at least 45%, preferably about 50%, 55%, 60%, 70%, 75%, 80%, 90%, 95% and most preferably at least about 98% identical to amino acids 105 to 232 of SEQ ID NO: 68, which is the human TANGO 253 C1q domain or amino acids 105 to 232 of SEQ ID NO: 70, which is the mouse TANGO 253 C1q domain.

[1075] Embodiments of TANGO 253 family members include, but are not limited to, human, mouse and rat TANGO 253 nucleic acids and proteins. The features of the human and mouse TANGO 253 are described below. A cDNA encoding a rat TANGO 253 nucleotide sequence, identified in clone jtrxa001e10t1, is 75.4% identical to human TANGO 253 in a 536 bp overlap. Further, the isolated rat TANGO 253 nucleotide sequence is 86% identical to mouse TANGO 253 in a 472 bp overlap.

[1076] Embodiments of TANGO 257 family members include, but are not limited to, human, mouse and rat TANGO 257 nucleic acids and proteins. The features of the human and mouse TANGO 257 are described below. A cDNA encoding a rat TANGO 257 nucleotide sequence, identified within clone jtrxa102g06t1, is 83.8% identical to human TANGO 257 in a 734 bp overlap. Further, the isolated rat TANGO 257 nucleotide sequence is 88.4% identical to mouse TANGO 257 in a 731 bp overlap.

[1077] In one example, a TANGO 257 family member includes one or more of the following domains: (1) an extracellular domain; (2) a transmembrane domain; and (3) a cytoplasmic domain. In one embodiment, a TANGO 257 protein contains cytoplasmic domains of about amino residues 1 to 202 and about amino acid residues 338 to 406, transmembrane domains of about amino acid residues 203 to 221 and about amino acid residues 321 to 337, and an extracellular domain of about amino acid residues 222 to 320 of SEQ ID NO: 72. In an alternative embodiment, a TANGO 257 protein contains an extracellular domain of about amino acid residues 1 to 320 or a mature extracellular domain of about amino acid residues 22 to 320, a transmembrane domain of about amino acid residues 321 to 337, and a cytoplasmic domain of about amino acid residues 338 to 406 of SEQ ID NO: 72. In another embodiment, a mature TANGO 257 protein contains about amino acid residues 22 to 406 of SEQ ID NO: 72.

[1078] In another embodiment, a TANGO 257 protein contains intracellular domains of about amino acid residues 1 to 202 and about amino acid residues 338 to 406, transmembrane domains of about amino acid residues 203 to 221 and about amino acid residues 321 to 337, and an extracellular domain of about amino acid residues 222 to 320 of SEQ ID NO: 72. In alternative embodiment, a TANGO 257 protein contains an extracellular domain of about amino acid residues 1 to 320 or a mature extracellular domain of about amino acid residues 22 to 320, a transmembrane domain of about amino acid residues 321 to 337, and an intracellular domain of about amino acid residues 338 to 406 of SEQ ID NO: 72. In another embodiment, a mature TANGO 257 protein contains about amino acid residues 22 to 406 of SEQ ID NO: 72.

[1079] In another example, an INTERCEPT 258 family member includes one or more of the following domains: (1) an extracellular domain; (2) a transmembrane domain; and (3) a cytoplasmic domain. Thus, in one embodiment, an INTERCEPT 258 protein contains extracellular domains of about amino acid residues 1 to 206 or about amino acid residues 30 to 206 and about amino acid residues 272 to 370, transmembrane domains of about amino acid residues 207 to 224 and about amino acid residues 247 to 271, and a cytoplasmic domain of about amino acid residues 225 to 246 of SEQ ID NO: 76. In an alternative embodiment, an INTERCEPT 258 protein contains an extracellular domain of about amino acid residues 272 to 370, a transmembrane domain of about amino acid residues 247 to 271, and a cytoplasmic domain of about amino acid residues 1 to 246 or a mature cytoplasmic domain of about amino acid residues 30 to 246 of SEQ ID NO: 76. In accordance with these embodiments, an INTERCEPT 258 protein is a mature protein containing an extracellular, transmembrane and cytoplasmic domain of about amino acids 30 to 370 of SEQ ID NO: 76.

[1080] In another embodiment, an INTERCEPT 258 protein contains an extracellular domain of about amino acids 1 to 249, or a mature extracellular domain of about amino acids 30 to 249 of SEQ ID NO: 76. In another embodiment, an INTERCEPT 258 protein contains a transmembrane domain of about amino acids 250 to 274 of SEQ ID NO: 76. In another embodiment, an INTERCEPT 258 protein contains a cytoplasmic domain of about amino acids 275 to 394 of SEQ ID NO: 76. In accordance with these embodiments, an INTERCEPT 258 protein is a mature protein containing an extracellular, transmembrane and cytoplasmic domain of about 30 to 394 of SEQ ID NO: 76.

[1081] INTERCEPT 258 family members can also include an immunoglobulin (Ig) domain contained within the extracellular domain. As used herein, the term “Ig domain” refers to a protein domain bearing homology to immunoglobulin superfamily members. An Ig domain includes about 30-90 amino acid residues, preferably about 40-80 amino acid residues, more preferably about 50-70 amino acid residues, still more preferably about 55-65 amino acid residues, and most preferably about 57 to 59 amino acid residues. In certain embodiments, an Ig domain contains a conserved cysteine residue within about 5 to 15 amino acid residues, preferably about 7 to 12 amino acid residues, and most preferably about 8 amino acid residues from its N-terminal end, and another conserved cysteine residue within about 1 to 5 amino acid residues, preferably about 2 to 4 amino acid residues, and most preferably about 3 amino acid residues from its C-terminal end.

[1082] An Ig domain typically has the following consensus sequence, beginning about 1 to 15 amino acid residues, more preferably about 3 to 10 amino acid residues, and most preferably about 5 amino acid residues from the C terminal end of the domain: (FY)-Xaa-C-Xaa-(VA)-COO-, wherein (FY) is either a phenylalanine or a tyrosine residue (preferably tyrosine), where “Xaa” is any amino acid, C is a cysteine residue, (VA) is either a valine or an alanine residue (preferably alanine), and COO- is the protein C terminus.

[1083] In one embodiment, an INTERCEPT 258 family member includes one or more Ig domains having an amino acid sequence that is at least about 55%, preferably at least about 65%, more preferably at least 75%, yet more preferably at least about 85%, and most preferably at least about 95% identical to amino acids 49 to 128 and/or amino acids 167 to 226, which are the Ig domains of human INTERCEPT 258.

[1084] In another embodiment, an INTERCEPT 258 family member includes one or more Ig domains having an amino acid sequence that is at least about 55%, preferably at least about 65%, more preferably at least about 75%, yet more preferably at least about 85%, and most preferably at least about 95% identical to amino acids 167 to 226, includes a conserved cysteine residue about 8 residues downstream from the N-terminus of the Ig domain, and has one or more Ig domain consensus sequences described herein. In another embodiment, an INTERCEPT 258 family member includes one or more Ig domains having an amino acid sequence that is at least 55%, preferably at least about 65%, more preferably at least about 75%, yet more preferably at least about 85%, and most preferably at least about 95% identical to amino acids 167 to 226 of SEQ ID NO: 76, includes a conserved cysteine residue 8 residues downstream from the N-terminus of the Ig domain, has one or more Ig domain consensus sequences described herein, and has a conserved cysteine within the consensus sequence that forms a disulfide both with said first conserved cysteine. In yet another embodiment, an INTERCEPT 258 family member includes one or more Ig domains having an amino acid sequence that is at least 55%, preferably at least about 65%, more preferably at least about 75%, yet more preferably at least about 85%, and most preferably at least about 95% identical to amino acids 167 to 226 of SEQ ID NO: 76, includes a conserved cysteine residue 8 residues downstream from the N-terminus of the Ig domain, has one or more Ig domain consensus sequences described herein, has a conserved cysteine within the consensus sequence that forms a disulfide both with said first conserved cysteine, and has at least one INTERCEPT 258 biological activity as described herein.

[1085] In a preferred embodiment, an INTERCEPT 258 family member has the amino acid sequence wherein the aforementioned Ig conserved residues are located as follows: the N-terminal conserved cysteine residue is located at about amino acid position 174 and the C-terminal conserved cysteine is located at about amino acid position 224 of SEQ ID NO: 76.

[1086] In another embodiment, an INTERCEPT 258 family member includes one or more Ig domains having an amino acid sequence that is at least about 55%, preferably at least about 65%, more preferably at least about 75%, yet more preferably at least about 85%, and most preferably at least about 95% identical to amino acids 170 to 229 of SEQ ID NO: 76, which is the Ig domain of mouse INTERCEPT 258. In another embodiment, an INTERCEPT 258 family member includes one or more Ig domains having an amino acid sequence that is at least about 55%, preferably at least about 65%, more preferably at least about 75%, yet more preferably at least about 85%, and most preferably at least about 95% identical to amino acids 170 to 229 of SEQ ID NO: 76, includes a conserved cysteine residue about 8 residues downstream from the N-terminus of the Ig domain, and has one or more Ig domain consensus sequences described herein, has a conserved cysteine within the consensus sequence that forms a disulfide both with said first conserved cysteine, and has at least one INTERCEPT 258 biological activity as described herein.

[1087] In a preferred embodiment, an INTERCEPT 258 family member has the amino acid sequence wherein the aforementioned Ig domain conserved residues are located as follows: the N-terminal conserved cysteine residue is located at about amino acid residue position 177 and the C-terminal conserved cysteine residue is located at about amino acid position 227 of SEQ ID NO: 76.

[1088] Human TANGO 253

[1089] A cDNA encoding human TANGO 253 was identified by analyzing the sequences of clones present in a coronary artery smooth muscle library for sequences that encode secreted proteins. The primary cells utilized in construction of the library had been stimulated with agents that included phorbol 12-myristate 13-acetate (PMA), tumor neurosis factor (TNF), ionomycin, and cyclohexamide (CHX). This analysis led to the identification of a clone, Athma27h9, encoding full-length human TANGO 253. The human TANGO 253 cDNA of this clone is 1339 nucleotides long (FIGS. 84A-84B; SEQ ID NO: 67). The open reading frame of this eDNA, nucleotides 188 to 916, encodes a 243 amino acid secreted protein (SEQ ID NO: 68).

[1090] FIG. 85 depicts a hydropathy plot of human TANGO 253. The dashed vertical line separates the signal sequence (amino acids 1 to 15) on the left from the mature protein (amino acids 15 to 243 of SEQ ID NO: 68) on the right.

[1091] The signal peptide prediction program SIGNALP (Nielsen et al., 1997, Protein Engineering 10: 1-6) predicted that human TANGO 253 includes a 15 amino acid signal peptide (amino acid 1 to amino acid 15 of SEQ ID NO: 68) preceding the mature human TANGO 253 protein (corresponding to amino acid 16 to amino acid 243 of SEQ ID NO: 68). The molecular weight of TANGO 253 protein without post-translational modifications is 25.3 kDa prior to the cleavage of the signal peptide, 23.8 kDa after cleavage of the signal peptide.

[1092] Human TANGO 253 includes a collagen domain (at about amino acids 36 to 95) and a C1q domain (at about amino acids 105 to 232) containing 23 G-X-Y repeats. An RGD cell attachment site is found at amino acids 77 to 79.

[1093] Three protein kinase C phosphorylation sites are present in human TANGO 253. The first has the sequence SAK (at amino acids 107 to 109), the second has the sequence TGK (at amino acids 140 to 142), and the third has the sequence SIK (at amino acids 220 to 222). Human TANGO 253 has three N-myristylation sites. The first has the sequence GLAAGS (at amino acids 11 to 16), the second has the sequence GGRPGL (at amino acids 68 to 73) and the third has the sequence GIYASI (at amino acids 216 to 221).

[1094] Northern analysis of human TANGO 253 expression demonstrates strong expression in heart, lung, liver, kidney and pancreas, and moderate expression in brain, placenta and skeletal muscle. Liver expression reveals two human TANGO mRNA bands, one of approximately 1.3 kb (which is the size observed in the other tissues) as well as a band at approximately 1 kb, which may be the result of an alternative splicing event.

[1095] Secretion assays reveal a human TANGO 253 protein of approximately 30 kDa. The secretion assays were performed as follows: 8×10⁵293T cells were plated per well in a 6-well plate and the cells were incubated in growth medium (DMEM, 10% fetal bovine serum, penicillin/strepomycin) at 37° C., 5% CO₂ overnight. 293T cells were transfected with 2 μg of full-length TANGO 253 inserted in the pMET7 vector/well and 10 μg LipofectAMINE (GIBCO/BRL Cat. # 18324-012)/well according to the protocol for GIBCO/BRL LipofectAMINE. The transfectant was removed 5 hours later and fresh growth medium was added to allow the cells to recover overnight. The medium was removed and each well was gently washed twice with DMEM without methionine and cysteine (ICN Cat. # 16-424-54). 1 ml DMEM without methionine and cysteine with 50 μCi Trans-³⁵S (ICN Cat. # 51006) was added to each well and the cells were incubated at 37° C., 5% CO₂ for the appropriate time period. A 150 μl aliquot of conditioned medium was obtained and 150 μl of 2×SDS sample buffer was added to the aliquot. The sample was heat-inactivated and loaded on a 4-20% SDS-PAGE gel. The gel was fixed and the presence of secreted protein was detected by autoradiography.

[1096] TANGO 253 exhibits homology to an adipocyte complement-mediated protein precursor and so may be involved in adipocyte function, e.g., may act as a signaling molecule for adipocyte tissue. FIGS. 89A-89B shows an alignment of the human TANGO 253 amino acid sequence with the human adipocyte complement-mediated protein precursor amino acid sequence. The alignment shows that there is a 38.7% overall amino acid sequence identity between human TANGO 253 and human adipocyte complement-mediated protein precursor.

[1097] FIGS. 90A-90D shows an alignment of the nucleotide sequence of human adipocyte complement-mediated protein precursor nucleotide sequence; GenBank Accession Number A1417523) and the nucleotide sequence of human TANGO 253. The alignment shows a 29.1% overall sequence identity between the two nucleotide sequences.

[1098] The human TANGO 253 nucleotide sequence was mapped to human chromosome 11, between flanking markers D11S1356 and D11S924 using the Genebridge 4 Human Radiation hybrid mapping panel with CAAAGTGAGCTCATGCTCTCAC as the forward primer and CTCTGGTCTTGGGCAGAAATC as the reverse primer.

[1099] Clone EpT253, which encodes human TANGO 253, was deposited with the American Type Culture Collection (10801 University Boulevard, Manassas, Va. 20110-2209) on Apr. 21, 1999 and assigned Accession Number 207222. This deposit will be maintained under the terms of the Budapest Treaty on the International Recognition of the Deposit of Microorganisms for the Purposes of Patent Procedure. This deposit was made merely as a convenience for those of skill in the art and is not an admission that a deposit is 15required under 35 U.S.C. §112.

[1100] Mouse TANGO 253

[1101] A cDNA encoding mouse TANGO 253 was identified by analyzing the sequences of clones present in a mouse microglia library using a rat TANGO 253 probe from sciatic nerve. This analysis led to the identification of a clone, AtmXa1e1075, encoding full-length mouse TANGO 253. The mouse TANGO 253 cDNA of this clone is 1263 nucleotides long (FIGS. 86A-86B; SEQ ID NO: 69). The open reading frame of this cDNA (nucleotides 135 to 863 of SEQ ID NO: 69) encodes a 243 amino acid secreted protein (SEQ ID NO: 70).

[1102] FIG. 87 depicts a hydropathy plot of mouse TANGO 253. The dashed vertical line separates the signal sequence (amino acid 1 to amino acid 15 of SEQ ID NO: 70) on the left from the mature protein (amino acid 16 to amino acid 243 of SEQ ID NO: 70) on the right.

[1103] The signal peptide prediction program SIGNALP (Nielsen et al., 1997, Protein Engineering 10:1-6) predicted that mouse TANGO 253 includes a 15 amino acid signal peptide (amino acid 1 to amino acid 15 of SEQ ID NO: 70) preceding the mature mouse TANGO 253 protein (corresponding to amino acid 16 to amino acid 243 of SEQ ID NO: 70). The molecular weight of mouse TANGO 253 protein without post-translational modifications is 25.4 kDa prior to the cleavage of the signal peptide, 23.9 kDa after cleavage of the signal peptide.

[1104] Mouse TANGO 253 includes a collagen domain (at amino acids 36 to 95) and a C1q domain (at amino acids 105-232).

[1105] Three protein kinase C phosphorylation sites are present in mouse TANGO 253. The first has the sequence SAK (at amino acids 107 to 109), the second has the sequence TGK (at amino acids 140 to 142), and the third has the sequence SIK (at amino acids 220 to 222). Mouse TANGO 253 has four N-myristylation sites. The first has the sequence GLVSGS (at amino acids 11 to 16), the second has the sequence GGRPGL (at amino acids 68 to 73), the third has the sequence GQSIAS (at amino acids 172 to 177), and the fourth has the sequence GIYASI (at amino acids 216 to 221).

[1106] As shown in FIGS. 5A-5B, human TANGO 253 protein and mouse TANGO 253 protein are 93.8% identical. FIG. 89B shows an alignment of the mouse TANGO 253 amino acid sequence with the human adipocyte complement-mediated protein precursor amino acid sequence. The alignment shows that there is a 38.3% overall amino acid sequence identity between mouse TANGO 253 and human adipocyte complement-mediated protein precursor.

[1107] FIGS. 91A-91D shows an alignment of the nucleotide sequence of human adipocyte complement-mediated protein precursor nucleotide sequence; GenBank Accession Number A1417523) and the nucleotide sequence of mouse TANGO 253. The alignment shows a 30.4% overall sequence identity between the two nucleotide sequences.

[1108] In situ tissue screening was performed on mouse embryonic tissue (obtained from embryos at embryonic day 13.5 to postnatal day 1.5) and adult tissue to determine the expression of mouse TANGO 253 mRNA. Expression of mouse TANGO 253 during embryogenesis was ubiquitously expressed throughout the central nervous system. Strong expression of mouse TANGO 253 was detected in choriod plexus of the fourth ventricle of E18.5 and E1.5 embryos examined. Expression of mouse TANGO 253 was also detected in the lungs of E14.5 and E15.5 embryos and in the kidneys of E15.5 embryos.

[1109] Mouse TANGO 253 expression was detected by in situ hybridization in the following adult tissues: a signal was detected in the brain in the choroid plexus of the lateral and 4th ventricles, and the olfactory bulb; a signal was detected in the cortical region of the kidney consistent with the pattern of glomeruli (in particular, the cortical radial veins); a ubiquitous signal was detected in the thymus; a weak, ubiquitous signal was detected in the spleen; a moderate signal was associated with the seminiferous vesicles of the testes; a signal was detected in the ovaries; and a ubiquitous signal restricted to the zone of giant cells was detected in the placenta.

[1110] Clone EpTm253, which encodes mouse TANGO 253, was deposited with the American Type Culture Collection (10801 University Boulevard, Manassas Va. 20110-35 2209) on Apr. 21, 1999 and assigned Accession Number 207215. This deposit will be maintained under the terms of the Budapest Treaty on the International Recognition of the Deposit of Microorganisms for the Purposes of Patent Procedure. This deposit was made merely as a convenience for those of skill in the art and is not an admission that a deposit is required under 35 U.S.C. §112.

[1111] Uses of TANGO 253 Nucleic Acids, Polypeptides, and Modulators Thereof

[1112] As TANGO 253 was originally found in the coronary artery smooth muscle library described above, TANGO 253 nucleic acids, proteins, and modulators thereof can be used to modulate the proliferation, development, differentiation, and/or function of organs, e.g., tissues and cells that form blood vessels and coronary tissue, e.g., cells of the coronary connective tissue, e.g., abnormal coronary smooth muscle cells and/or endothelial cells of blood vessels. TANGO 253 nucleic acids, proteins, and modulators thereof can also be used to modulate symptoms associated with abnormal coronary function, e.g., heart diseases and disorders such as atherosclerosis, coronary artery disease and plaque formation.

[1113] In light of the collagen domain, TANGO 253 nucleic acids, proteins and modulators thereof can be utilized to modulate (e.g., stabilize, promote, inhibit or disrupt) cell/extracellular matrix (ECM) interactions, cell/cell interactions and, for example, signal transduction events associated with such interactions. For example, such TANGO 253 compositions and modulators thereof can be used to modulate binding of such ECM-associated factors as integrin and can function to modulate ligand binding to cell surface receptors. In addition, TANGO 253 nucleic acids, proteins and modulators thereof can be utilized to modulate connective tissue formation, maintenance and function, as well as to modulate symptoms associated with connective tissue-related disorders, to promote wound healing, and to reduce, slow or inhibit ameliorate connective tissue-related signs of aging, such as wrinkle formation.

[1114] In light of the C1q domain exhibited by TANGO 253 proteins and their similarity to the collectin family, TANGO 253 nucleic acids, proteins and modulators thereof can be utilized to modulate immune-related processes such as the ability to modulate host immune response by, e.g., modulating one or more elements in the serum complement cascade, including, for example activation of the cascade, formation of and/or binding to immune complexes, detection and defense against surface antigens and bacteria, and immune surveillance for rapid removal or pathogens. Such TANGO 253 compositions and modulators thereof can be utilized, e.g., to ameliorate incidence of any symptoms associated with disorders that involve such immune-related processes, including, but not limited to infection and autoimmune disorders.

[1115] In addition, such compositions and modulators thereof can be utilized to modulate folding and alignment of the collagen domain (e.g., into a triple helix), disorders associated with collagen defects, including but not limited to bone disorders, e.g., bone resorption disorders, or hearing, e.g., inner ear, disorders, to modulate protein-protein interactions and recognition events (either homotypic or heterotypic) and cellular response events (e.g., signal transduction events) associated with such interactions and recognitions, and to ameliorate symptoms associated with abnormal signaling, protein-protein interaction and/or cellular response events including, but not limited to cell proliferation disorders such as cancer, abnormal neuronal interactions, such as disorders involving abnormal synaptic activity, e.g., abnormal Purkinje cell activities.

[1116] Human TANGO 253 protein contains an RGD domain. As such, TANGO 253 nucleic acids, proteins and modulators thereof can be utilized to modulate processes involved in, e.g., bone development, sepsis, tumor progression, metastasis, cell migration, fertilization, and cellular interactions with the extracellular matrix required for growth, differentiation, and apoptosis, as well as cellular processes involving cell adhesion, such as cell migration.

[1117] TANGO 253 proteins exhibit similarity to adipocyte complement-related protein precursor and can act as signaling molecules for adipocyte tissue. In light of this, TANGO 253 nucleic acids, proteins and modulators thereof can be utilized to modulate adipocyte function and adipocyte-related processes and disorders such as, e.g., obesity.

[1118] TANGO 253 nucleic acids, proteins, and modulators thereof can also be utilized to modulate the development, differentiation, maturation, proliferation and/or activity of cells of the central nervous system such as neurons, glial cells (e.g., astrocytes and oligodendrocytes), and Schwann cells. TANGO 253 nucleic acids, polypeptides, or modulators thereof can also be used to treat disorders of the brain, such as cerebral edema, hydrocephalus, brain herniations, iatrogenic disease (due to, e.g., infection, toxins, or drugs), inflammations (e.g., bacterial and viral meningitis, encephalitis, and cerebral toxoplasmosis), cerebrovascular diseases (e.g., hypoxia, ischemia, and infarction, intracranial hemorrhage and vascular malformations, and hypertensive encephalopathy), tumors (e.g., neuroglial tumors, neuronal tumors, tumors of pineal cells, meningeal tumors, primary and secondary lymphomas, intracranial tumors, and medulloblastoma), and to treat injury or trauma to the brain.

[1119] TANGO 253 nucleic acids, proteins, and modulators thereof can also be utilized to treat renal (kidney) disorders, such as glomerular diseases (e.g., acute and chronic glomerulonephritis, rapidly progressive glomerulonephritis, nephrotic syndrome, focal proliferative glomerulonephritis, glomerular lesions associated with systemic disease, such as systemic lupus erythematosus, Goodpasture's syndrome, multiple myeloma, diabetes, polycystic kidney disease, neoplasia, sickle cell disease, and chronic inflammatory diseases), tubular diseases (e.g., acute tubular necrosis and acute renal failure, polycystic renal diseasemedullary sponge kidney, medullary cystic disease, nephrogenic diabetes, and renal tubular acidosis), tubulointerstitial diseases (e.g., pyelonephritis, drug and toxin induced tubulointerstitial nephritis, hypercalcemic nephropathy, and hypokalemic nephropathy), acute and rapidly progressive renal failure, chronic renal failure, nephrolithiasis, gout, vascular diseases (e.g., hypertension and nephrosclerosis, microangiopathic hemolytic anemia, atheroembolic renal disease, diffuse cortical necrosis, and renal infarcts), or tumors (e.g., renal cell carcinoma and nephroblastoma).

[1120] TANGO 253 nucleic acids, proteins and modulators thereof can, in addition to the above, be utilized to regulate or modulate development and/or differentiation of processes involved in microglial, lung, liver, kidney, pancreas, brain, placental and skeletal muscle formation and activity, as well as in ameliorating any symptom associated with a disorder of such cell types, tissues and organs.

[1121] TANGO 253 expression can be utilized as a marker (e.g., an in situ marker) for specific tissues (e.g., the brain) and/or cells (e.g., neurons) in which TANGO 253 is expressed. TANGO 253 nucleic acids can also be utilized for chromosomal mapping.

[1122] Human TANGO 257

[1123] A cDNA encoding human TANGO 257 was identified by analyzing the sequences of clones present in a coronary smooth muscle library for sequences that encode secreted proteins. This analysis led to the identification of a clone, Athma7c10, encoding full-length human TANGO 257. The human TANGO 257 cDNA of this clone is 1832 nucleotides long (FIGS. 92A-92C; SEQ ID NO: 71). The open reading frame of this cDNA, nucleotides 88 to 1305, encodes a 406 amino acid secreted protein (SEQ ID NO: 72). FIG. 93 depicts a hydropathy plot of human TANGO 257.

[1124] The signal peptide prediction program SIGNALP (Nielsen et al., 1997, Protein Engineering 10: 1-6) predicted that human TANGO 257 includes a 21 amino acid signal peptide (amino acid I to amino acid 21) preceding the mature human TANGO 257 protein (corresponding to amino acid 22 to amino acid 406). The molecular weight of human TANGO 257 protein without post-translational modifications is 46.0 kDa prior to the cleavage of the signal peptide, 43.8 kDa after cleavage of the signal peptide.

[1125] Two N-glycosylation sites are present in human TANGO 257. The first has the sequence NDTA and is found at amino acids 177 to 180, and the second has the sequence NRTV and is found at amino acids 248 to 251. A cAMP and cGMP dependent protein kinase phosphorylation site having the sequence RKAS is found in human TANGO 257 at amino acids 196 to 199. Five protein kinase C phosphorylation sites are present in human TANGO 257. The first has the sequence SSR (at amino acids 48 to 50), the second has the sequence SGR (at amino acids 84 to 86), the third has the sequence SMK (at amino acids 144 to 146), the fourth has the sequence TEK (at amino acids 166 to 168) and the fifth has the sequence SLR (at amino acids 374 to 376). Five casein kinase II phosphorylation sites are present in human TANGO 257. The first has the sequence TEAD (at amino acids 78 to 81), the second has the sequence TQND (at amino acids 175 to 178), the third has the sequence TVVD (at amino acids 250 to 253), the fourth has the sequence TYID (at amino acids 272 to 275), and the fifth has the sequence TRED (at amino acids 289 to 292). Human TANGO 257 has a tyrosine kinase phosphorylation site having the sequence RLEREVDY at amino acids 89 to 96). Human TANGO 257 has three N-myristylation sites. The first has the sequence GGPGTK (at amino acids 115 to 120), the second has the sequence GGPAGL (at amino acids 152 to 157) and the third has the sequence GAHASL (at amino acids 370 to 375). Human TANGO 257 has an amidation site having the sequence KGRR at amino acids 122 to 125.

[1126] Northern analysis of human TANGO 257 expression demonstrates moderate expression in heart, liver and pancreas, and low expression in kidney, lung and skeletal muscle.

[1127] Secretion assays reveal a human TANGO 257 protein of approximately 50 kDa, The secretion assays were performed as described in the human TANGO 253 section above.

[1128] The human TANGO 257 nucleotide sequence was mapped to human chromosome 1 using the Genebridge 4 Human Radiation hybrid mapping panel with GGATGATGG CTACCAGATTGTC as the forward primer and GGAACATTGAGGGTTTTGACTC as the reverse primer.

[1129] TANGO 257 is homologous to a protein encoded by a nucleic acid sequence referred to in PCT Publication WO 98/39446 as “gene 64”. FIG. 97 shows an alignment of the human TANGO 257 amino acid sequence with the gene 64 encoded amino acid sequence. As shown in the FIGURE, the 353 amino acid gene 64 polypeptide is identical to amino acid residues 1-353 of human TANGO 257. Human TANGO 257 contains 406 amino acids, i.e., contains an additional 53 amino acid residues carboxy to residue 353. The overall amino acid sequence identity between full-length human TANGO 257 polypeptide and the gene 64-encoded polypeptide is approximately 87%.

[1130] FIGS. 98A-98D show an alignment of the nucleotide sequence of gene 64 (PCT Publication WO 98/39446) and the nucleotide sequence of human TANGO 257. The nucleotide sequences of gene 64 and human TANGO 257 are 93.5% identical. Among the differences between the sequences is a cytosine nucleotide at human TANGO 257 position 1587 that represents an insertion relative to the corresponding gene 64 position when the gene 64 and TANGO 257 sequences are aligned. This additional cytosine results in the TANGO 257 open reading frame being 1218 base pairs encoding a polypeptide of 406 amino acid residues. In contrast, the gene 64 nucleic acid sequence encodes a polypeptide of only 353 amino acid residues, as discussed above.

[1131] Clone EpT257, which encodes human TANGO 257, was deposited with the American Type Culture Collection (10801 University Boulevard, Manassas Va. 20110-2209) on Apr. 21, 1999 and assigned Accession Number 207222. This deposit will be maintained under the terms of the Budapest Treaty on the International Recognition of the Deposit of Microorganisms for the Purposes of Patent Procedure. This deposit was made merely as a convenience for those of skill in the art and is not an admission that a deposit is required under 35 U.S.C. §112.

[1132] Mouse TANGO 257

[1133] A cDNA encoding mouse TANGO 257 was identified by analyzing the sequences of clones present in a mouse microglia library using a rat TANGO 257 probe. This analysis led to the identification of a clone, Atmua102gb1, encoding full-length mouse TANGO 257. The mouse TANGO 257 cDNA of this clone is 1721 nucleotides long (FIGS. 94A-94C; SEQ ID NO: 73). The open reading frame of this cDNA, nucleotides 31 to 1248, encodes a 406 amino acid secreted protein (SEQ ID NO: 74).

[1134] FIG. 95 depicts a hydropathy plot of mouse TANGO 257.

[1135] The signal peptide prediction program SIGNALP (Nielsen et al., 1997, Protein Engineering 10:1-6) predicted that mouse TANGO 257 includes a 21 amino acid signal peptide (amino acid 1 to amino acid 21 of SEQ ID NO: 74) preceding the mature TANGO 257 protein (corresponding to amino acid 22 to amino acid 406 of SEQ ID NO: 74). The molecular weight of mouse TANGO 257 protein without post-translational modifications is 45.8 kDa prior to the cleavage of the signal peptide, 43.6 kDa after cleavage of the signal peptide.

[1136] Two N-glycosylation sites are present in mouse TANGO 257. The first has the sequence NDTA and is found at amino acids 177 to 180, and the second has the sequence NRTV and is found at amino acids 248 to 251. A cAMP and cGMP-dependent protein kinase phosphorylation site having the sequence RKAS is found in mouse TANGO 257 at amino acids 196 to 199. Five protein kinase C phosphorylation sites are present in mouse TANGO 257. The first has the sequence SSR (at amino acids 48 to 50), the second has the sequence TLR (at amino acids 75 to 77), the third has the sequence SGR (at amino acids 84 to 86), the fourth has the sequence SMK (at amino acids 144 to 146) and the fifth has the sequence SLR (at amino acids 374 to 376). Five casein kinase II phosphorylation sites are present in mouse TANGO 257. The first has the sequence TEAD (at amino acids 78 to 81), the second has the sequence TQND (at amino acids 175 to 178), the third has the sequence TVVD (at amino acids 250 to 253), the fourth has the sequence TYID (at amino acids 272 to 275), and the fifth has the sequence TRRD (at amino acids 289 to 292). Mouse TANGO 5257 has a tyrosine kinase phosphorylation site having the sequence RLEREVDY at amino acids 89 to 96. Mouse TANGO 257 has four N-myristylation sites. The first has the sequence GGPGAK (at amino acids 115 to 120), the second has the sequence GGSVGL (at amino acids 151 to 157), the third has the sequence GGPGGG (at amino acids 227 to 232), and the fourth has the sequence GAHASL (at amino acids 370 to 375). Mouse TANGO 257 has an amidation site having the sequence KGRR at amino acids 122 to 125.

[1137] As shown in FIG. 96, human TANGO 257 protein and mouse TANGO 257 protein are 94.1% identical.

[1138] FIG. 99 shows an alignment of mouse TANGO 257 amino acid sequence with the amino acid sequence encoded by gene 64. As shown in the FIGURE, the 253 amino acid gene 64 polypeptide and the 406 amino acid mouse TANGO 257 polypeptide and the 406 amino acid mouse TANGO 257 polypeptide are approximately 82% identical. FIG. 100A-F show an alignment of the nucleotide sequence of gene 64 (PCT publication no. 98/39446) and the nucleotide sequence of mouse TANGO 257. As shown in the FIG. 100A-100F, the two nucleotide sequences are approximately 76% identical.

[1139] In situ tissue screening was performed on mouse adult tissues and embryonic tissues (obtained from embryos E13.5 to P1.5) to analyze for the expression of mouse TANGO 257 mRNA. Mouse TANGO 257 expression was detected the following adult tissues: the submandibular gland; the renal papilla region of the kidney; the capsule region of the adrenal gland; and the labyrinth zone of the placenta.

[1140] In the case of embryonic expression, mouse TANGO 257 expression was detected in the bones, lungs, intestines, and kidneys. At E13.5, a signal was detected in many tissues including the developing bone structures such as the vertebrae, of the spinal column, jaw, and scapula. At E14.5, the signal pattern was very similar to that detected at E13.5. At 15.5, a signal was detected in all major bone structures, including the skull, basisphenoid bone, upper and lower incisor teeth, vertebral column, sternum, scapula, and femur. A ubiquitous signal was also detected in the lung, kidney, and intestinal tract. At 16.5 and 18.5, the signal is very similar to that detected at E15.5. At P1.5, a signal was still detected in all of the major bone structures and signal detected in the lung, kidney, and intestines has dropped to nearly background levels.

[1141] Clone EpTm257, which encodes mouse TANGO 257, was deposited with the American Type Culture Collection (10801 University Boulevard, Manassas Va. 20110-2209) on Apr. 21, 1999 and assigned Accession Number 207117. This deposit will be maintained under the terms of the Budapest Treaty on the International Recognition of the Deposit of Microorganisms for the Purposes of Patent Procedure. This deposit was made merely as a convenience for those of skill in the art and is not an admission that a deposit is required under 35 U.S.C. §112.

[1142] Uses of TANGO 257 Nucleic Acids Polypeptides and Modulators Thereof

[1143] As TANGO 257 was originally found in a coronary artery smooth muscle library, TANGO 257 nucleic acids, proteins, and modulators thereof can be used to modulate the proliferation, development, differentiation, and/or function of organs, e.g., heart, tissues and cells that form blood vessels and coronary tissue, e.g., cells of the coronary connective tissue, e.g., coronary smooth muscle cells and/or endothelial cells of blood vessels. TANGO 257 nucleic acids, proteins, and modulators thereof can also be used to modulate symptoms associated with abnormal coronary function, e.g., heart diseases and disorders such as atherosclerosis, coronary artery disease and plaque formation.

[1144] In light of TANGO 257's homology to the extracellular molecule olfactomedin, TANGO 257 nucleic acids, proteins and modulators thereof can be utilized to modulate development, differentiation, proliferation and/or activity of neuronal cells, e.g. olfactory neurons and to modulate neuronal activities involving maintenance, growth and/or differentiation of chemosensory cilia, modulate cell-cell interactions and cell-ECM interactions, e.g., neuronal (such as olfactory) cell-ECM interactions. TANGO 257 nucleic acids, proteins and modulations thereof can also be used to modulate symptoms associated with abnormal processes involving such cells and/or activities, for example neuronal function, e.g., neurological disorders, neurodegenerative disorders, neuromuscular disorders, cognitive disorders, personality disorders, and motor disorders, and chemosensory disorders, such as olfactory-related disorders.

[1145] TANGO 257 exhibits homology to a gene referred to as “gene 64” (PCT Publication No. WO 98/39446), which is expressed primarily in fetal lung tissue. In light of this, TANGO 257 nucleic acids, proteins and modulators thereof can also be used to modulate development, differentiation, proliferation and/or activity of pulmonary system cells, e.g., lung cell types, and to modulate a symptom associated with disorders of pulmonary development, differentiation and/or activity, e.g., cystic fibrosis. TANGO 257 nucleic acids, proteins and modulators thereof can also be used to modulate symptoms associated with abnormal pulmonary development or function, such as lung diseases or disorders associated with abnormal pulmonary development or function, e.g., cystic fibrosis. TANGO 257 nucleic acids, polypeptides, or modulators thereof can be used to treat pulmonary (lung) disorders, such as atelectasis, cystic fibrosis, rheumatoid lung disease, pulmonary congestion or edema, chronic obstructive airway disease (e.g., emphysema, chronic bronchitis, bronchial asthma, and bronchiectasis), diffuse interstitial diseases (e.g., sarcoidosis, pneumoconiosis, hypersensitivity pneumonitis, bronchiolitis, Goodpasture's syndrome, idiopathic pulmonary fibrosis, idiopathic pulmonary hemosiderosis, pulmonary alveolar proteinosis, desquamative interstitial pneumonitis, chronic interstitial pneumonia, fibrosing alveolitis, hamman-rich syndrome, pulmonary eosinophilia, diffuse interstitial fibrosis, Wegener's granulomatosis, lymphomatoid granulomatosis, and lipid pneumonia), or tumors (e.g., bronchogenic carcinoma, bronchiolovlveolar carcinoma, bronchial carcinoid, hamartoma, and mesenchymal tumors).

[1146] TANGO 257 nucleic acids, proteins and modulators thereof can also be used to modulate cell proliferation, e.g., abnormal cell proliferation. Such modulation may, for example, be via modulation of one or more elements involved in signal transduction cascades.

[1147] TANGO 257 nucleic acids, proteins and modulators thereof can also be utilized to modulate the development, differentiation, maturation, proliferation and/or activity of bone cells such as osteocytes, and to treat bone associated diseases or disorders. Examples of bone diseases and disorders include bone injury due to for example, trauma (e.g., bone breakage, cartilage tearing), degeneration (e.g., osteoporosis), degeneration of joints, e.g., arthritis, e.g., osteoarthritis, and bone wearing. Further, TANGO 257 nucleic acids, proteins and modulators thereof can be utilized to modulate or regulate the development of bone structures such as the skull, the basisphenoid bone, the upper and lower incisor teeth, the vertebral column, the sternum, the scapula, and the femur during embryogenesis.

[1148] TANGO 257 nucleic acids, proteins and modulators thereof can, in addition to the above, be utilized to regulate or modulate development and/or differentiation of processes involved in microglial, liver, kidney, and skeletal muscle formation and activity, as well as in ameliorating a symptom associated with a disorder of such cell types, tissues and organs.

[1149] TANGO 257 nucleic acids, polypeptides, or modulators thereof can also be used to treat renal (kidney) disorders, such as glomerular diseases (e.g., acute and chronic glomerulonephritis, rapidly progressive glomerulonephritis, nephrotic syndrome, focal proliferative glomerulonephritis, glomerular lesions associated with systemic disease, such as systemic lupus erythematosus, Goodpasture's syndrome, multiple myeloma, diabetes, polycystic kidney disease, neoplasia, sickle cell disease, and chronic inflammatory diseases), tubular diseases (e.g., acute tubular necrosis and acute renal failure, polycystic renal diseasemedullary sponge kidney, medullary cystic disease, nephrogenic diabetes, and renal tubular acidosis), tubulointerstitial diseases (e.g., pyelonephritis, drug and toxin induced tubulointerstitial nephritis, hypercalcemic nephropathy, and hypokalemic nephropathy), acute and rapidly progressive renal failure, chronic renal failure, nephrolithiasis, gout, vascular diseases (e.g., hypertension and nephrosclerosis, microangiopathic hemolytic anemia, atheroembolic renal disease, diffuse cortical necrosis, and renal infarcts), or tumors (e.g., renal cell carcinoma and nephroblastoma). TANGO 257 polypeptides, nucleic acids, or modulators thereof can be used to treat intestinal disorders, such as ischemic bowel disease, infective enterocolitis, Crohn's disease, benign tumors, malignant tumors (e.g., argentaffinomas, lymphomas, adenocarcinomas, and sarcomas), malabsorption syndromes (e.g., celiac disease, tropical sprue, Whipple's disease, and abetalipoproteinemia), obstructive lesions, hernias, intestinal adhesions, intussusception, or volvulus.

[1150] Further, TANGO 257 expression can be utilized as a marker (e.g. an in situ marker) for specific tissues (i.e., bone structures) and/or cells (i.e., osteocytes) in which TANGO 257 is expressed. TANGO 257 nucleic acids can also be used for chromosomal mapping.

[1151] Human Intercept 258

[1152] A cDNA encoding human INTERCEPT 258 was identified by analyzing the sequences of clones present in a human mixed lymphocyte reaction library for sequences that encode secreted proteins. This analysis led to the identification of a clone, Ath1xtce, encoding full-length human INTERCEPT 258. The human INTERCEPT 258 cDNA of this clone is 1869 nucleotides long (FIGS. 101A-101C; SEQ ID NO: 75). The open reading frame of this cDNA (nucleotides 153 to 1262 of SEQ ID NO: 75) encodes a 370 amino acid transmembrane protein (SEQ ID NO: 76).

[1153] FIG. 102 depicts a hydropathy plot of human INTERCEPT 258. The dashed vertical line separates the signal sequence (amino acids 1 to 29 of SEQ ID NO: 76) on the left from the mature protein (amino acids 30 to 370 of SEQ ID NO: 76) on the right.

[1154] The signal peptide prediction program SIGNALP (Nielsen et al., 1997, Protein Engineering 10:1-6) predicted that human INTERCEPT 258 includes a 29 amino acid signal peptide (amino acid 1 to amino acid 29 of SEQ ID NO: 76) preceding the mature INTERCEPT 258 protein (corresponding to amino acid 30 to amino acid 370 of SEQ ID NO: 76). The molecular weight of human INTERCEPT 258 protein without post-translational modifications is 40.0 kDa prior to the cleavage of the signal peptide, 37.0 kDa after cleavage of the signal peptide.

[1155] Human INTERCEPT 258 contains a hydrophobic transmembrane domain at amino acids amino acids 207 to 224 and amino acids 247 to 271 of SEQ ID NO: 76. Human INTERCEPT 258 also contains two Ig domains, one at amino acids 49 to 128 of SEQ ID NO: 76 and a second at amino acids 167 to 226 of SEQ ID NO: 76.

[1156] Five N-glycosylation sites are present in human INTERCEPT 258. The first has sequence NLSL and is found at amino acids 108 to 111, the second has the sequence NUTL and is found at amino acids 169 to 172; the third is has the sequence NLSS and is found at amino acids 213 to 216, the fourth has the sequence NUTL and is found at amino acids, 236 to 239, and the fifth has the sequence NGTL and is found at amino acids 307 to 310. Seven protein kinase C phosphorylation sites are present in human INTERCEPT 258. The first has the sequence TSK and is found at amino acids 93 to 95, the second has the sequence SLR and is found at amino acids 110 to 112, the third has the sequences SIK and is found at amino acids 141 to 143, the fourth has the sequence SCR and is found at amino acids 157 to 159, the fifth has the sequence SPR and is found at amino acids 176 to 179, the sixth has the sequence SAR and is found at amino acids 315 to 317, and the seventh has the sequence SPR and is found at amino acids 344 to 346. The human INTERCEPT 258 protein has seven N-myristoylation sites. The first has the sequence GUTTSK and is found at amino acids 90 to 95, the second has the sequence GANVTL and is found at amino acids 167 to 172, the third has the sequence GVYVCK and is found at amino acids 220 to 225, the fourth has the sequence GTAQCN and is found at amino acids 231 to 236, the fifth has the sequence GTLVGL and is found at amino acids 256 to 261, the sixth has the sequence GLLAGL and is found at amino acids 262 to 267, and the seventh has the sequence GTLSSU and is found at acids 308 to 313.

[1157] The human INTERCEPT 258 gene was mapped to human chromosome 11 using Genebridge 4 Human Radiation hybrid mapping panel with GGAGTATCCTTGGTCTACTCC as the forward primer and GAAAGTCTGGAAGGATGGAAGCT as the reverse primer.

[1158] Human multi-tissue dot blot analysis of human INTERCEPT 258 expression demonstrates strongest expression in lung, fetal lung, placenta, thyroid gland and mammary gland. Moderate expression is observed in heart, aorta, kidney, small intestine, fetal heart, fetal kidney, fetal spleen, uterus, and stomach. Weak expression is observed in whole brain, amygdala, caudate nucleus, cerebellum, cerebral cortex frontal lobe, hippocampus, medulla oblongata, occipital lobe, putamen, substantia nigra, temporal lobe, thalamus, acumens, spinal cord, skeletal muscle, colon, bladder, prostate, ovary, pancreas, pituitary gland, adrenal gland, salivary gland, liver, spleen, thymus, lymph node, bone marrow, appendix, trachea, fetal brain, fetal liver, and fetal thymus.

[1159] A human cancer cell line Northern blot analysis showed a roughly 2.0 kb INTERCEPT 258 band only in the lane containing cell line Chronic Myelogenous Leukemia (K-562). The cancerous cell lines in which INTERCEPT 258 was not expressed include promyeocytic leukemia, Hela, lymphoblastic leukemia, Burkitt's lymphoma Raji, colorectal adenocarcinoma, lung carcinoma and melanoma.

[1160] INTERCEPT 258 exhibits homology to a human A33 antigen. A33 antigen is a transmembrane glycoprotein and a member of the immunoglobulin superfamily that may represent a cancer cell marker (Heath et al., 1997, Proc. Natl. Acad. Sci. USA 94:469-474).

[1161] FIG. 106 shows an alignment of the human INTERCEPT 258 amino acid sequence with the human A33 amino acid sequence. The alignment shows that there is a 23.0% overall amino acid sequence identity between human INTERCEPT 258 and A33.

[1162] FIGS. 107A-107F show an alignment of the human INTERCEPT 258 nucleotide sequence with that of human A33 nucleotide sequence. The alignment shows that there is a 40.6% identity between the two sequences.

[1163] Human INTERCEPT 258 nucleotide sequence exhibits homology to human PECAM-1 nucleotide sequence. FIGS. 110A-110E show that there is an overall 40.5% identity between the two nucleotide sequences. Human INTERCEPT 258 amino acid sequence and human PECAM-1 amino acid sequence share less than 18% identity. PECAM-1 (platelet endothelial cell adhesion molecule-1) is an integrin expressed on endothelial cells.

[1164] Clone EpT258, which encodes human INTERCEPT 258, was deposited with the American Type Culture Collection (10801 University Boulevard, Manassas Va. 20110-2209) on Apr. 21, 1999 and assigned Accession Number 207222. This deposit will be maintained under the terms of the Budapest Treaty on the International Recognition of the Deposit of Microorganisms for the Purposes of Patent Procedure. This deposit was made merely as a convenience for those of skill in the art and is not an admission that a deposit is required under 35 U.S.C. §112.

[1165] Mouse Intercept 258

[1166] A cDNA encoding mouse INTERCEPT 258 was identified by analyzing the sequences of clones present in a mouse megakaryocyte library for sequences that encode secreted proteins. This analysis led to the identification of a clone, Athmeal 7c8, encoding full-length mouse INTERCEPT 258. The mouse INTERCEPT 258 cDNA of this clone is 1846 nucleotides long (FIGS. 103A-103C; SEQ ID NO: 77). The open reading frame of this cDNA (nucleotides 107 to 1288 of SEQ ID NO: 77) encodes a 394 amino acid transmembrane protein (SEQ ID NO: 78).

[1167] FIG. 104 depicts a hydropathy plot for mouse INTERCEPT 258. The signal peptide prediction program SIGNALP (Nielsen et al., 1997, Protein Engineering 10:1-6) predicted that mouse INTERCEPT 258 includes a 29 amino acid signal peptide (amino acid 1 to amino acid 29 of SEQ ID NO: 78) preceding the mature INTERCEPT 258 protein (corresponding to amino acid 30 to amino acid 394 of SEQ ID NO: 78). The molecular weight INTERCEPT 258 without post-translational modifications is 41.8 kDa prior to the cleavage of the signal peptide, 38.90 kDa after cleavage of the signal peptide.

[1168] Mouse INTERCEPT 258 contains a hydrophobic transmembrane domain at amino acids 250 to 274 of SEQ ID NO: 78. Mouse INTERCEPT 258 also contains an Ig domain at amino acids 170 to 229 of SEQ ID NO: 78.

[1169] Five N-glycosylation sites are present in mouse INTERCEPT 258. The first has sequence NVSL and is found at amino acids 111 to 114, the second has the sequence NVTL and is found at amino acids 172 to 175, the third has the sequence NLSI and is found at amino acids 216 to 219, the fourth has the sequence NVTL and is found at amino acids, 239 to 242, and the fifth has the sequence NGTL and is found at amino acids 310 to 313. Nine protein kinase C phosphorylation sites are present in mouse INTERCEPT 258. the first has the sequence TNK and is found at amino acids 96 to 98, the second has the sequence SSR and is found at amino acids 108 to 110, the third has the sequence SLR and is found at amino acids 113 to 115, the fourth has the sequence TYR and is found at amino acids 126 to 128, the fifth has the sequence SIK and is found at amino acids 144 to 146, the sixth has the sequence SPR and is found at amino acids 179 to 181, the seventh has the sequence SLK and is found at amino acids 211 and 213, the eighth has the sequence SAR and is found at amino acids 318 to 320, and the ninth has the sequence SPR and is found at amino acids 348 to 350. The mouse INTERCEPT 258 contains a casein kinase II phosphorylation site having the sequence TLEE, found at amino acids 280 to 283. The mouse INTERCEPT 258 protein has nine N-myristoylation sites. The first has the sequence GTPETS and is found at amino acids 6 to 11, the second has the sequence GVMTNK and is found at amino acids 125 to 130, the third has the sequence GTYRCS and is found at amino acids 125 to 130, the fourth has the sequence GTNVTL and is found at amino acids 170 to 175, the fifth has the sequence GVYVCK and is found at amino acids 223 to 228, the sixth has the sequence GSKAAV and is found at amino acids 247 to 252, the seventh has the sequence GAVVGT and is found at amino acids 255 to 260, the eighth has sequence GTLSSV and is found at amino acids 311 to 316, and the ninth has the sequence GGVSSS and is found at amino acids 367 to 372.

[1170] An in situ expression analysis of INTERCEPT 258 was performed as summarized herein. Mouse INTERCEPT 258 expression during embryogenesis (E73.5 to P1.5 were examined) was observed throughout the animal in a punctate pattern. This pattern is very similar to that seen with the molecule PECAM-1, but at a lower intensity. PECAM-1 is an integrin expressed on endothelial cells. In addition, lung and brown fat exhibited a much higher signal in a more ubiquitous pattern in all embryonic stages examined. Heart and kidney also have a higher expression, but to a lesser degree. Adult mouse INTERCEPT 258 expression was seen in many tissues, often in a multifocal, punctate pattern suggestive of vessels. Expression was also predominant in many highly vascularized tissues such as ovary (especially the septol region), kidney and adrenal cortex.

[1171] In general, both embryonic and adult expression patterns were suggestive of endothelial cells being a component in the expression patters observed. In summary, tissues in which INTERCEPT 258 expression was observed were as follows: brain, eye, harderian gland, submanibular gland, bladder, brown fat, stomach, heart, kidney, adrenal gland, colon, liver, thymus, lymph node, spleen, spinal cord, ovary, testes and placenta.

[1172] As shown in FIG. 105, human INTERCEPT 258 protein and mouse INTERCEPT 258 protein are 62.8% identical.

[1173] Mouse INTERCEPT 258 exhibits homology to a human A33 antigen.

[1174] FIG. 108 shows an alignment of mouse INTERCEPT 258 amino acid sequence with the human A33 amino acid sequence. The alignment shows that there is a 23% overall amino acid sequence identity between the two sequences.

[1175] FIGS. 109A-109I show an alignment of the mouse INTERCEPT 258 nucleotide sequence with that of the human A33 nucleotide sequence. The alignment shows that there is a 40% identity between these two nucleotide sequences.

[1176] Clone EpT258, which encodes mouse INTERCEPT 258, was deposited with the American Type Culture Collection (10801 University Boulevard, Manassas Va. 20110-2209) on Apr. 21, 1999 and assigned Accession Number 207221. This deposit will be maintained under the terms of the Budapest Treaty on the International Recognition of the Deposit of Microorganisms for the Purposes of Patent Procedure. This deposit was made merely as a convenience for those of skill in the art and is not an admission that a deposit is required under 35 U.S.C. §112.

[1177] Uses of INTERCEPT 258 Nucleic Acids, Polypeptides, and Modulators Thereof

[1178] INTERCEPT 258 was identified as being expressed in a mixed lymphocyte library. In light of this, INTERCEPT 258 nucleic acids, proteins and modulators thereof can be utilized to modulate processes involved in lymphocyte development, differentiation and activity, including, but not limited to development, differentiation and activation of T cells, including T helper, T cytotoxic and non-specific T killer cell types and subtypes, and B cells, immune functions associated with such cells, and amelioration of one or more symptoms associated with abnormal function of such cell types. Such disorders can include, but are not limited to, autoimmune disorders, such as organ specific autoimmune disorders, e.g., autoimmune thyroiditis, Type I diabetes mellitus, insulin-resistant diabetes, autoimmune anemia, multiple sclerosis, and/or systemic autoimmune disorders, e.g., rheumatoid arthritis, lupus or sclerodoma, allergy, including allergic rhinitis and food allergies, asthma, psoriasis, graft rejection, transplantation rejection, graft versus host disease, pathogenic susceptibilities, e.g., susceptibility to certain bacterial or viral pathogens, wound healing and inflammatory reactions.

[1179] INTERCEPT 258 includes one or more Ig domains. INTERCEPT 258 nucleic acids, proteins, and modulators thereof can, therefore, be used to modulate immune function, e.g., by the modulation of immunoglobulins and the formation of antibodies. For the same reason, INTERCEPT 258 nucleic acids, proteins, and modulators thereof can be used to modulate immune response, leukocyte trafficking, cancer, Type I immunologic disorders, e.g., anaphylaxis and/or rhinitis, by modulating the interaction between antigens and cell receptors, e.g., high affinity IgE receptors.

[1180] INTERCEPT 258 exhibits homology to PECAM-1, a cell adhesion integrin molecule that has been shown to mediate cell-cell interactions, play an important role in bidirectional signal transduction, and may be involved in thrombotic, inflammatory and immunological disorders. As such, INTERCEPT 258 nucleic acids, proteins, and modulators thereof can be utilized to modulate cell/cell interactions and, for example, signal transduction events associated with such interactions. For example, such INTERCEPT 258 compositions and modulators thereof can be used to modulate binding of cellular factors or ECM-associated factors such as integrin and can function to modulate ligand binding to cell surface receptors. Further, such INTERCEPT 258 compositions and modulators thereof can be utilized to ameliorate at least one symptom associated with thrombotic disorders, e.g., stroke, inflammatory processes or disorders, and immune disorders.

[1181] In light of INTERCEPT 258 expression, INTERCEPT 258 nucleic acids, proteins and modulators thereof can be utilized modulate development, differentiation, proliferation and/or activity of pulmonary system cells, e.g., lung cell types, and to modulate a symptom associated with disorders of pulmonary development, differentiation and/or activity, such as lung diseases or disorders associated with abnormal pulmonary development or function, e.g., cystic fibrosis. INTERCEPT 258 nucleic acids, proteins and modulators thereof can also be utilized modulate development, differentiation, proliferation and/or activity of thyroid cells, megakaryocytes or mammary gland cells, and can further be utilized to ameliorate at least one symptom of disorders associated with, abnormal thyroid function, e.g., thyroiditis or Grave's disease, abnormal megakaryocyte differentiation or function, e.g., anemias or leukemias, hematological diseases such as thrombocytopenia, platelet disorders and bleeding disorders, such as hemophilia or abnormal mammary development or function.

[1182] INTERCEPT 258 nucleic acids, polypeptides, or modulators thereof can be used to treat renal (kidney) disorders, such as glomerular diseases (e.g., acute and chronic glomerulonephritis, rapidly progressive glomerulonephritis, nephrotic syndrome, focal proliferative glomerulonephritis, glomerular lesions associated with systemic disease, such as systemic lupus erythematosus, Goodpasture's syndrome, multiple myeloma, diabetes, polycystic kidney disease, neoplasia, sickle cell disease, and chronic inflammatory diseases), tubular diseases (e.g., acute tubular necrosis and acute renal failure, polycystic renal diseasemedullary sponge kidney, medullary cystic disease, nephrogenic diabetes, and renal tubular acidosis), tubulointerstitial diseases (e.g., pyelonephritis, drug and toxin induced tubulointerstitial nephritis, hypercalcemic nephropathy, and hypokalemic nephropathy), acute and rapidly progressive renal failure, chronic renal failure, nephrolithiasis, gout, vascular diseases (e.g., hypertension and nephrosclerosis, microangiopathic hemolytic anemia, atheroembolic renal disease, diffuse cortical necrosis, and renal infarcts), or tumors (e.g., renal cell carcinoma and nephroblastoma).

[1183] INTERCEPT 258 nucleic acids, polypeptides, or modulators thereof can also be used to treat disorders of the brain, such as cerebral edema, hydrocephalus, brain herniations, iatrogenic disease (due to, e.g., infection, toxins, or drugs), inflammations (e.g., bacterial and viral meningitis, encephalitis, and cerebral toxoplasmosis), cerebrovascular diseases (e.g., hypoxia, ischemia, and infarction, intracranial hemorrhage and vascular malformations, and hypertensive encephalopathy), and tumors (e.g., neuroglial tumors, neuronal tumors, tumors of pineal cells, meningeal tumors, primary and secondary lymphomas, intracranial tumors, and medulloblastoma), and to treat injury or trauma to the brain.

[1184] INTERCEPT 258 nucleic acids, proteins, and modulators thereof can still further be utilized to modulate development, differentiation proliferation and/or activity of cells involved in kidney or heart formation and function. In addition, such compositions and modulators thereof can be utilized to ameliorate at least one symptom of disorders associated with abnormal kidney or heart formation or function, including, but not limited to nephritis, coronary disease, atherosclerosis and plaque formation.

[1185] INTERCEPT 258 expression indicates that INTERCEPT 258 is involved, in addition to the above, in such processes as thermogenesis, adipocyte function, and vascularization. As such, INTERCEPT 258 nucleic acids, proteins, and modulators thereof can be utilized to modulate such processes as well as for ameliorating at least one symptom associated with such processes. Such disorders include, but are not limited to obesity, regulation of body temperature, and disorders involving abnormal vascularization, e.g., vascularization of solid tumors.

[1186] In further light of INTERCEPT 258 expression, as well as in light of its homology to A33 antigen, INTERCEPT 258 nucleic acids, proteins and modulators thereof can be utilized to modulate cell proliferation, including, for example, epithelial, e.g., gastrointestinal tract epithelial cell proliferation, and to ameliorate at least one symptom of cell proliferative disorders such as cancer, and, in particular, chronic myelogenous leukemia, colon cancers, small bowel epithelium cancers and other gastrointestinal tract cancers. Further, INTERCEPT 258 expression can be utilized as a marker for specific tissues (e.g., vascularized tissues) and/or cells (e.g., endothelial cells) in which INTERCEPT 258 is expressed. INTERCEPT 258 nucleic acids can also be utilized for chromosomal mapping.

[1187] Human TANGO 204

[1188] A cDNA encoding TANGO 204 was identified by analyzing the sequences of clones present in a human lung cDNA library.

[1189] This analysis led to the identification of a clone, Athu204c, encoding full-length human TANGO 204. The cDNA of this clone is 3057 nucleotides long (FIGS. 111A-111D; SEQ ID NO: 79). The 792 nucleotide open reading frame of this cDNA (nucleotides 99-890 of SEQ ID NO: 79) encodes a 264 amino acid protein (SEQ ID NO: 80).

[1190] In one embodiment of a nucleotide sequence of human TANGO 204 the nucleotide at position 170 is a guanine (G). In this embodiment, the amino acid at position 24 is glutamate (E). In another embodiment of a nucleotide sequence of human TANGO 204 the nucleotide at position 170 is a cytosine (C). In this embodiment, the amino acid at position 24 is aspartate (D) In another embodiment of a nucleotide sequence of human TANGO 204, the nucleotide at position 335 is an adenine (A). In this embodiment, the amino acid at position 79 is a glutamate (E). In another embodiment of a nucleotide sequence of human TANGO 204, the nucleotide at position 335 is a cytosine (C). In this embodiment, the amino acid at position 79 is aspartate (D). In another embodiment of a nucleotide sequence of human TANGO 204, the nucleotide at position 410 is a guanine (G). In this embodiment, the amino acid at position 104 is a glutamate (E). In another embodiment of a nucleotide sequence of human TANGO 204, the nucleotide at position 410 is a cytosine (C). In this embodiment, the amino acid at position 104 is aspartate (D).

[1191] The presence of a methionine residue at amino acid residue positions 6, 170, 192, and 210 of SEQ ID NO: 80 indicates that there can be alternative forms of human TANGO 204 of 259 amino acids, 95 amino acids, 73 amino acids, and 55 amino acids, respectively.

[1192] Another embodiment of the invention includes isolated nucleic acid molecules comprising a polynucleotide having a nucleotide sequence encoding the polypeptide having the human TANGO 204 polypeptide sequence, but lacking the N-terminal methionine residue. In this embodiment, the nucleotide sequence of human TANGO 204, nucleotides 102-890, encodes the human TANGO 204 amino acid sequence from amino acids 2-264 of SEQ ID NO: 80.

[1193] The signal peptide prediction program SIGNALP (Nielsen et al. (1997) Protein Engineering 10: 1-6) predicted that human TANGO 204 includes a 20 amino acid signal peptide (amino acid 1 to about amino acid 20 of SEQ ID NO: 80) preceding the mature human TANGO 204 protein (corresponding to about amino acid 21 to amino acid 264 of SEQ ID NO: 80).

[1194] In one embodiment, a TANGO 204 protein contains a signal sequence of about amino acids 1-20. In certain embodiments, a TANGO 204 family member has the amino acid sequence, and the signal sequence is located at amino acids 1 to 18, 1 to 19, 1 to 20, 1 to 21 or 1 to 22. In such embodiments of the invention, the domains and the mature protein resulting from cleavage of such signal peptides are also included herein. For example, the cleavage of a signal sequence consisting of amino acids 1 to 20 results in a mature TANGO 204 protein corresponding to amino acids 21 to 264 of SEQ ID NO: 80. The signal sequence is normally cleaved during processing of the mature protein.

[1195] TANGO 204 family members can also include a somatomedin B domain. Somatomedin B domains are present in plasma cell glycoprotein PC-1 and placental protein 11. Somatomedin B domains have the sequence Cys-Xaa₆-C-Xaa₉-Cys-Xaa-Cys-Xaa₃-Cys-Xaa₅-Cys-Cys-Xaa₅-Cys (where Xaa can be any amino acid). The most highly conserved portion of the somatomedin B domain has the sequence Cys-Xaa-Cys-Xaa₃-C-Xaa₄-Cys-Cys-Xaa₄-Cys (where Xaa can be any amino acid). The cysteine residues within the domain are all likely involved in disulfide bonds. A consensus somatomedin B domain has the sequence. This consensus sequence is shown in FIG. 113 where the more conserved residues in the consensus sequence are indicated by uppercase letters and the less conserved residues in the consensus sequence are indicated by lowercase letters. The somatomedin B domain of human TANGO 204 is located at amino acids 18-75.

[1196] TANGO 204 family members can also include a thrombospondin type I domain. A consensus thrombospondin type 1 domain has the sequence depicted in the alignment shown in FIG. 114. This consensus sequence is shown in FIG. 114 where the more conserved residues in the consensus sequence are indicated by uppercase letters and the less conserved residues in the consensus sequence are indicated by lowercase letters. The thrombospondin type 1 domain of human TANGO 204 is located at amino acids 78-121. Thrombospondin type 1 domains can include the sequence CS(ANV)TCG and the sequence W(S/G)XW.

[1197] Human TANGO 204 that has not been post-translationally modified is predicted to have a molecular weight of 29.6 kDa prior to cleavage of its signal peptide and a molecular weight of 27.3 kDa subsequent to cleavage of its signal peptide.

[1198] Human TANGO 204 includes a somatomedin B domain at amino acids 18-75 of SEQ ID NO: 80. FIG. 113 depicts an alignment of the somatomedin B domain of human TANGO 204 with a consensus somatomedin B domain derived from a hidden Markov model. Human TANGO 204 also includes a thrombospondin type I domain at amino acids 78-221 of SEQ ID NO: 80. FIG. 114 depicts an alignment of the thrombospondin type I domain of human TANGO 204 with a consensus thrombospondin type I domain derived from a hidden Markov model.

[1199] An N-glycosylation site is present at amino acids 227-230. A cAMP and cGMP-dependent protein kinase phosphorylation site is present at amino acids 97-100. Protein kinase C phosphorylation sites are present at amino acids 93-95, 214-216, and 243-245. A casein kinase II phosphorylation site is present at amino acids 161-164. N-myristoylation sites are present at amino acids 17-22, 48-53, 129-134, and 236-241. A growth factor and cytokine receptor family signature sequence is present at amino acids 78-84. A somatomedin B domain signature sequence is present at amino acids 50-70.

[1200] Clone Athu204c, which encodes human TANGO 204, was deposited as fthv204c with the American Type Culture Collection (10801 University Boulevard, Manassas, Va. 20110-2209) on Apr. 2, 1999 and assigned Accession Number 207192. This deposit will be maintained under the terms of the Budapest Treaty on the International Recognition of the Deposit of Microorganisms for the Purposes of Patent Procedure. This deposit was made merely as a convenience for those of skill in the art and is not an admission that a deposit is required under 35 U.S.C. §112.

[1201] FIG. 112 depicts a hydropathy plot of human TANGO 204. The hydropathy plot indicates that human TANGO 204 has a signal sequence at its amino terminus and a hydrophobic region at its carboxy terminus, suggesting that TANGO 204 is a membrane-associated protein.

[1202] TANGO 204 is likely membrane-associated through its hydrophobic carboxy-terminus. The last nine amino acids of human TANGO 204 (amino acids 256-264) are very hydrophobic. Further, there are two pairs of basic residues near the hydrophobic C-terminus (KK at amino acids 245-246 and RR at amino acids 248-249). These residues can serve as proteolytic cleavage sites. Thus, cleavage at either pair of basic residues can release a soluble form of TANGO 204 (amino acid 20-244, 20-245, 20-246, 20-287, 20-288, or 20-249). In addition, there is a RRR sequence at amino acids amino acids 97-99, and proteolytic cleavage at this sequence can release a soluble form of TANGO 204 (amino acids 20-96, 20-97, 20-98, or 20-99). The presence of a somatomedin B domain sequence within human TANGO 204 is consistent with TANGO 204 being a membrane-associated protein.

[1203] The human TANGO 204 gene maps to chromosome 8q between D8S257 and D8S508 based on the homology between a portion of human TANGO 204 and Genbank Accession Number G25656, which is reported to map to this position.

[1204] Mouse TANGO 204

[1205] A mouse homolog of human TANGO 204 was identified. A cDNA encoding mouse TANGO 204 was identified by analyzing the sequences of clones present in a stimulated mouse osteoblast cDNA library.

[1206] This analysis led to the identification of a clone, Atmoa043g03, encoding full-length mouse TANGO 204. The cDNA of this clone is 1294 nucleotides long (FIGS. 115A-115B; SEQ ID NO: 81). The 792 nucleotide open reading frame of this cDNA (nucleotides 81-872 of SEQ ID NO: 81) encodes a 264 amino acid protein (SEQ ID NO: 82).

[1207] In one embodiment of a nucleotide sequence of mouse TANGO 204 the nucleotide at position 152 is a guanine (G). In this embodiment, the amino acid at position 24 is glutamate (E). In another embodiment of a nucleotide sequence of mouse TANGO 204, the nucleotide at position 152 is a cytosine (C). In this embodiment, the amino acid at position 24 is aspartate (D). In another embodiment of a nucleotide sequence of mouse TANGO 204, the nucleotide at position 392 is an adenine (A). In this embodiment, the amino acid at position 104 is a glutamate (E). In another embodiment of a nucleotide sequence of mouse TANGO 204, the nucleotide at position 392 is a cytosine (C). In this embodiment, the amino acid at position 104 is aspartate (D). In another embodiment of a nucleotide sequence of mouse TANGO 204, the nucleotide at position 425 is an adenine (A). In this embodiment, the amino acid at position 116 is a glutamate (E). In another embodiment of a nucleotide sequence of mouse TANGO 204, the nucleotide at position 425 is a cytosine (C). In this embodiment, the amino acid at position 116 is aspartate (D).

[1208] The presence of a methionine residue at amino acid residue positions 6, 170, 192, and 210 indicates that there can be alternative forms of mouse TANGO 204 of 259 amino acids, 95 amino acids, 73 amino acids, and 55 amino acids, respectively.

[1209] Another embodiment of the invention includes isolated nucleic acid molecules comprising a polynucleotide having a nucleotide sequence encoding the polypeptide having the mouse TANGO 204 polypeptide sequence, but lacking the N-terminal methionine residue. In this embodiment, the nucleotide sequence of mouse TANGO 204, nucleotides 84-872, encodes the mouse TANGO 204 amino acid sequence comprising amino acids 2-264 of SEQ ID NO: 82.

[1210] The signal peptide prediction program SIGNALP (Nielsen et al. (1997) Protein Engineering 10:1-6) predicted that mouse TANGO 204 includes a 20 amino acid signal peptide (amino acid 1 to about amino acid 20 of SEQ ID NO: 82) preceding the mature mouse TANGO 204 protein (corresponding to about amino acid 21 to amino acid 264 of SEQ ID NO: 82).

[1211] Mouse TANGO 204 that has not been post-translationally modified is predicted to have a molecular weight of 29.5 kDa prior to cleavage of its signal peptide and a molecular weight of 27.2 kDa subsequent to cleavage of its signal peptide.

[1212] Mouse TANGO 204 includes a somatomedin B domain at amino acids 18-75 of SEQ ID NO: 82 and a thrombospondin type I domain at amino acids 78-121 of SEQ ID NO: 82.

[1213] In situ tissue screening was performed on mouse adult and embryonic tissue to analyze the expression of mouse TANGO 204 mRNA. In summary, embryonic expression was observed in a number of tissues and organs. Most noticeable was the expression in the eye, lung, stomach, intestine, and the tissue just under the skin in the feet which outlines the digits. Expression was also associated with some developing bone and cartilage structures such as the ear, nose, and spinal column. Expression decreased to background levels in most of these tissue and was observed in only a few adult tissues; eye, kidney, and adrenal gland.

[1214] Human and mouse TANGO 204 sequences exhibit considerable similarity at the protein, nucleic acid, and open reading frame levels. An alignment (made using the ALIGN software (Myers and Miller (1989) CABIOS, ver. 2.0); BLOSUM 62 scoring matrix; gap penalties −12/−4), reveals a protein identity of 89.4%. The human and mouse TANGO 204 full length cDNAs are 78.4% identical, as assessed using the same software and parameters as indicated. In the respective ORFs, calculated in the same fashion as the full length cDNAs, human and mouse TANGO 204 are 87.5% identical. The nucleotide sequence and amino acid sequence alignments of human and mouse TANGO 204 can be found in FIGS. 116A-116C and FIG. 117, respectively.

[1215] The mouse TANGO 204 gene was mapped to mouse using the Genebridge 4 Radiation hybrid mapping panel with GACAAGCTGCATTCAAAGCTTCC as the forward primer and CTGGAGCACATGGTAGTGATTC as the reverse primer. The mouse TANGO 204 gene maps to chromosome 1. Flanking markers for this region are D1Mit430 and D1Mit119. Mapping by synteny reveals that human TANGO 204 maps to human chromosome 8q. The CCAL1 (chondrocalcinosis 1) locus also maps to this region of the human chromosome. The OPRK (opiate receptor) gene also maps to this region of the human chromosome. The tb (tumbler), fz (fuzzy) loci also map to this region of the mouse chromosome. The tb (tumbler), fz (fuzzy) genes also map to this region of the mouse chromosome.

[1216] Clone Atmoa043g03, which encodes mouse TANGO 204, was deposited as Atmoa43g3 with the American Type Culture Collection (10801 University Boulevard, Manassas Va. 20110-2209) on Apr. 2, 1999 and assigned Accession Number 207189. This deposit will be maintained under the terms of the Budapest Treaty on the International Recognition of the Deposit of Microorganisms for the Purposes of Patent Procedure. This deposit was made merely as a convenience for those of skill in the art and is not an admission that a deposit is required under 35 U.S.C. §112.

[1217] Use of TANGO 204 Nucleic Acids, Polypeptides, and Modulators Thereof

[1218] TANGO 204 polypeptides, nucleic acids, and modulators thereof, can be used to modulate the function, morphology, proliferation and/or differentiation of cells in the tissues in which it is expressed. TANGO 204 includes a thrombospondin type 1 domain. Known proteins having this domain play a role in blood coagulation, cellular proliferation, cellular adhesion, migration of tumor cells, migration of normal cells, and angiogenesis. The thrombospondin type 1 domain can mediate interaction with matrix macromolecules, including heparan sulfate, proteoglycans, fibronectin, laminin, and collagen. TANGO 204 polypeptides, nucleic acids, and modulators thereof can be used to treat disorders of blood clotting, angiogenesis (e.g., to reduce tumor growth by inhibiting angiogenesis or promote wound healing by stimulating angiogenesis), and cancer. TANGO 204 polypeptides, nucleic acids, and modulators thereof can also be used to treat connective tissue disorders (Marfan syndrome and osteogenesis imperfecta). TANGO 204 includes a somatomedin B domain. Known proteins having this domain are involved in regulation of plasminogen activator inhibitor, a protein which regulates activity of plasmin, a protein involved in ovulation, angiogenesis, neoplasia, wound healing, embryonic development, and inflammation. Thus, TANGO 204 polypeptides, nucleic acids, and modulators thereof can also be used to treat disorders of ovulation. In addition, such molecules can be used to treat disorders associated with proteases in cardiovascular tissue, disorders of complement activation, and disorders of fibrinolysis.

[1219] With respect to angiogenisis in particular, angiogenesis is also involved in pathological conditions including the growth and metastasis of tumors. In fact, tumor growth and metastasis have been shown to be dependent on the formation of new blood vessels. Accordingly, TANGO 204 polypeptides, nucleic acids and/or modulators thereof can be used to modulate angiogenesis in proliferative disorders such as cancer, (e.g., fibrosarcoma, myxosarcoma, liposarcoma, chondrosarcoma, osteogenic sarcoma, chordoma, angiosarcoma, endotheliosarcoma, lymphangiosarcoma, lymphangioendotheliosarcoma, synovioma, mesothelioma, Ewing's tumor, leimyosarcoma, rhabdotheliosarcoma, colon sarcoma, pancreatic cancer, breast cancer, ovarian cancer, prostate cancer, squamous cell carcinoma, basal cell carcinoma, adenocarcinoma, sweat gland carcinoma, sebaceous gland carcinoma, papillary carcinoma, papillary adenocarcinomas, cystadenocarcinoma, medullary carcinoma, bronchogenic carcinoma, renal cell carcinoma, hematoma, bile duct carcinoma, melanoma, choriocarcinoma, semicoma, embryonal carcinoma, Wilms' tumor, cervical cancer, testicular tumor, lung carcinoma, small cell carcinoma, bladder carcinoma, epithelial carcinoma, glioma, astrocytoma, medulloblastoma, craniopharyngioma, ependynoma, pinealoma, hemangioblastoma, and retinoblastoma.

[1220] TANGO 204 polypeptides, nucleic acids, and modulators thereof, can be used to modulate the function, morphology, proliferation and/or differentiation of cells in the tissues in which it is expressed. Such molecules can be used to treat disorders associated with abnormal or aberrant metabolism or function of cells in the tissues in which it is expressed. Tissues in which TANGO 204 is expressed include, for example, eye, stomach, intestine, cortex adrenal gland, kidney, developing bone and cartilage structures such as the ear, nose, and spinal column, and the pericardium surrounding the heart.

[1221] In another example, because TANGO 204 is expressed in the pericardium surrounding the heart TANGO 201 polypeptides, nucleic acids, or modulators thereof, can be used to treat cardiovascular disorders, such as ischemic heart disease (e.g., angina pectoris, myocardial infarction, and chronic ischemic heart disease), hypertensive heart disease, pulmonary heart disease, valvular heart disease (e.g., rheumatic fever and rheumatic heart disease, endocarditis, mitral valve prolapse, and aortic valve stenosis), congenital heart disease (e.g., valvular and vascular obstructive lesions, atrial or ventricular septal defect, and patent ductus arteriosus), or myocardial disease (e.g., myocarditis, congestive cardiomyopathy, and hypertrophic cariomyopathy).

[1222] Because TANGO 204 is expressed in the kidney, the TANGO 204 polypeptides, nucleic acids and/or modulators thereof can be used to modulate the function, morphology, proliferation and/or differentiation of cells in the tissues in which it is expressed. Such molecules can also be used to treat disorders associated with abnormal or aberrant metabolism or function of cells in the tissues in which it is expressed. Such molecules can be used to treat or modulate renal (kidney) disorders, such as glomerular diseases (e.g., acute and chronic glomerulonephritis, rapidly progressive glomerulonephritis, nephrotic syndrome, focal proliferative glomerulonephritis, glomerular lesions associated with systemic disease, such as systemic lupus erythematosus, Goodpasture's syndrome, multiple myeloma, diabetes, neoplasia, sickle cell disease, and chronic inflammatory diseases), tubular diseases (e.g., acute tubular necrosis and acute renal failure, polycystic renal diseasemedullary sponge kidney, medullary cystic disease, nephrogenic diabetes, and renal tubular acidosis), tubulointerstitial diseases (e.g., pyelonephritis, drug and toxin induced tubulointerstitial nephritis, hypercalcemic nephropathy, and hypokalemic nephropathy) acute and rapidly progressive renal failure, chronic renal failure, nephrolithiasis, vascular diseases (e.g., hypertension and nephrosclerosis, microangiopathic hemolytic anemia, atheroembolic renal disease, diffuse cortical necrosis, and renal infarcts), or tumors (e.g., renal cell carcinoma and nephroblastoma).

[1223] As TANGO 204 exhibits expression in the small intestine, TANGO 204 polypeptides, nucleic acids, or modulators thereof, can be used to treat intestinal disorders, such as ischemic bowel disease, infective enterocolitis, Crohn's disease, benign tumors, malignant tumors (e.g., argentaffinomas, lymphomas, adenocarcinomas, and sarcomas), malabsorption syndromes (e.g., celiac disease, tropical sprue, Whipple's disease, and abetalipoproteinemia), obstructive lesions, hernias, intestinal adhesions, intussusception, or volvulus.

[1224] As mouse TANGO 204 was originally identified in an osteoblast cDNA library, TANGO 204 nucleic acids, proteins, and modulators thereof can be used to modulate the proliferation, activation, development, differentiation, and/or function of osteoblasts. Thus, TANGO 204 nucleic acids, proteins, and modulators thereof can be used to modulate the proliferation, differentiation, and/or function of bone and cartilage cells, e.g., chondrocytes and osteoblasts, and to treat bone and/or cartilage associated diseases or disorders. Examples of bone and/or cartilage diseases and disorders include bone and/or cartilage injury due to for example, trauma (e.g., bone breakage, cartilage tearing), degeneration (e.g., osteoporosis), degeneration of joints, e.g., arthritis, e.g., osteoarthritis, and bone wearing.

[1225] As human TANGO 204 was originally identified in a lung cDNA library, human TANGO 204 nucleic acids, proteins, and modulators thereof can be used to modulate the proliferation, activation, development, differentiation, and/or function of lung cells. Thus, TANGO 204 polypeptides, nucleic acids, or modulators thereof, can be used to treat pulmonary (lung) disorders, such as atelectasis, pulmonary congestion or edema, chronic obstructive airway disease (e.g., emphysema, chronic bronchitis, bronchial asthma, and bronchiectasis), diffuse interstitial diseases (e.g., sarcoidosis, pneumoconiosis, hypersensitivity pneumonitis, Goodpasture's syndrome, idiopathic pulmonary hemosiderosis, pulmonary alveolar proteinosis, desquamative interstitial pneumonitis, chronic interstitial pneumonia, fibrosing alveolitis, hamman-rich syndrome, pulmonary eosinophilia, diffuse interstitial fibrosis, Wegener's granulomatosis, lymphomatoid granulomatosis, and lipid pneumonia), or tumors (e.g., bronchogenic carcinoma, bronchiolovlveolar carcinoma, bronchial carcinoid, hamartoma, and mesenchymal tumors).

[1226] In another example, TANGO 204 polypeptides, nucleic acids, or modulators thereof, can be used to treat disorders of the adrenal cortex, such as hypoadrenalism (e.g., primary chronic or acute adrenocortical insufficiency, and secondary adrenocortical insufficiency), hyperadrenalism (Cushing's syndrome, primary hyperaldosteronism, adrenal virilism, and adrenal hyperplasia), or neoplasia (e.g., adrenal adenoma and cortical carcinoma).

[1227] Human TANGO 206

[1228] A cDNA encoding human TANGO 206 was identified by analyzing the sequences of clones present in a human osteoblast cDNA library.

[1229] This analysis led to the identification of a clone, Athoc49b12, encoding full-length human TANGO 206. The cDNA of this clone is 1840 nucleotides long (FIGS. 118A-118C; SEQ ID NO: 83). The 1260 nucleotide open reading frame of this cDNA (nucleotides 99-1358 of SEQ ID NO: 83) encodes a 420 amino acid protein (SEQ ID NO: 84).

[1230] In one embodiment of a nucleotide sequence of human TANGO 206 the nucleotide at position 281 is a guanine (G). In this embodiment, the amino acid at position 61 is glutamate (E). In another embodiment of a nucleotide sequence of human TANGO 206, the nucleotide at position 281 is a cytosine (C). In this embodiment, the amino acid at position 61 is aspartate (D). In another embodiment of a nucleotide sequence of human TANGO 206, the nucleotide at position 326 is a guanine (G). In this embodiment, the amino acid at position 76 is a glutamate (E). In another embodiment of a nucleotide sequence of human TANGO 206, the nucleotide at position 326 is a cytosine (C). In this embodiment, the amino acid at position 76 is aspartate (D). In another embodiment of a nucleotide sequence of human TANGO 206, the nucleotide at position 329 is an adenine (A). In this embodiment, the amino acid at position 77 is a glutamate (E). In another embodiment of a nucleotide sequence of human TANGO 206, the nucleotide at position 329 is a cytosine (C). In this embodiment, the amino acid at position 77 is aspartate (D).

[1231] The presence of a methionine residue at amino acid residue positions 282, 339, 358, 369, and 400 indicates that there can be alternative forms of human TANGO 206 of 139 amino acids, 82 amino acids, 63 amino acids, 52 amino acids, and 21 amino acids, respectively.

[1232] Another embodiment of the invention includes isolated nucleic acid molecules comprising a polynucleotide having a nucleotide sequence encoding the polypeptide having the human TANGO 206 polypeptide sequence, but lacking the N-terminal methionine residue. In this embodiment, the nucleotide sequence of human TANGO 206, nucleotides 102-1358 of SEQ ID NO: 83, encodes the human TANGO 206 amino acid sequence comprising amino acids 2-420 of SEQ ID NO: 84.

[1233] The signal peptide prediction program SIGNALP (Nielsen et al. (1997) Protein Engineering 10:1-6) predicted that human TANGO 206 includes a 29 amino acid signal peptide (amino acid 1 to about amino acid 29 of SEQ ID NO: 84) preceding the mature human TANGO 206 protein (corresponding to about amino acid 30 to amino acid 420 of SEQ ID NO: 84).

[1234] In another example, a TANGO 206 family member also includes one or more of the following domains: (1) an extracellular domain; (2) a transmembrane domain; and (3) a cytoplasmic domain.

[1235] In one embodiment, a TANGO 206 protein contains a signal sequence of about amino acids 1-29. In certain embodiments, a TANGO 206 family member has the amino acid sequence, and the signal sequence is located at amino acids 1 to 27, 1 to 28, 1 to 29, 1 to 30 or 1 to 31. In such embodiments of the invention, the domains and the mature protein resulting from cleavage of such signal peptides are also included herein. For example, the cleavage of a signal sequence consisting of amino acids 1 to 29 results in a mature TANGO 206 protein corresponding to amino acids 30 to 420 of SEQ ID NO: 84. The signal sequence is normally cleaved during processing of the mature protein.

[1236] In one embodiment, a TANGO 206 protein contains an extracellular domain of about amino acids 30-362 of SEQ ID NO: 84. In one embodiment, a TANGO 206 protein contains a transmembrane of about amino acids 363-379 of SEQ ID NO: 84. In another embodiment, a TANGO 206 protein contains a cytoplasmic domain of about amino acids 380-386 of SEQ ID NO: 84. In another embodiment, a TANGO 206 protein includes a transmembrane domain of about amino acids 387-405 of SEQ ID NO: 84. In still another embodiment, a TANGO 206 protein includes an extracellular domain of about amino acids 406-420 of SEQ ID NO: 84.

[1237] TANGO 206 family members can include a laminin EGF-like domain. A consensus laminin EGF-like domain has the sequence shown in the alignment depicted in FIG. 120, where the more conserved residues in the consensus sequence are indicated by uppercase letters and the less conserved residues in the consensus sequence are indicated by lowercase letters. The laminin EGF-like domain of human TANGO 204 is located at amino acids 168-211 of SEQ ID NO: 84. Laminin EGF-like domains are similar to EGF domains except that they include eight cysteines rather than 6 cysteines. All eight cysteines are expected to participate in disulfide bonds.

[1238] Human TANGO 206 is a transmembrane protein having a first extracellular domain which extends from about amino acid 30 to about amino acid 362, a first transmembrane domain which extends from about amino acid 363 to about amino acid 379, a cytoplasmic domain which extends from about amino acid 380 to about amino acid 386, a second transmembrane domain which extends from about amino acid 387 to about amino acid 405, and a second extracellular domain which extends from about amino acid 406 to amino acid 420 of SEQ ID NO: 84.

[1239] Alternatively, in another embodiment, a human TANGO 206 is a transmembrane protein having a first cytoplasmic domain which extends from about amino acid 30 to about amino acid 362, a first transmembrane domain which extends from about amino acid 363 to about amino acid 379, an extracellular domain which extends from about amino acid 380 to about amino acid 386, a second transmembrane domain which extends from about amino acid 387 to about amino acid 405, and a second cytoplasmic domain which extends from about amino acid 406 to amino acid 420 of SEQ ID NO: 84.

[1240] Human TANGO 206 includes a laminin EGF-like domain at amino acids 168-211 of SEQ ID NO: 84. FIGS. 110A-110E depicts an alignment of the laminin EGF-like domain of human TANGO 206 with a laminin EGF-like domain derived from a hidden Markov model.

[1241] Human TANGO 206 that has not been post-translationally modified is predicted to have a molecular weight of 45.4 kDa prior to cleavage of its signal peptide and a molecular weight of 42.1 kDa subsequent to cleavage of its signal peptide.

[1242] N-glycosylation sites are present at amino acids 79-82 and 205-208. A cAMP and cGMP-dependent protein kinase phosphorylation site is present at amino acids 290-293. Protein kinase C phosphorylation sites are present at amino acids 48-50, 63-65, 138-140, 159-161, 406-408, and 409-411. Casein kinase II phosphorylation sites are present at amino acids 63-66, 73-76, 99-102, 222-225, and 359-362. N-myristoylation sites are present at amino acids 8-13, 51-56, 59-64, 69-74, 167-172, 173-178, 188-193, 250-255, 267-272, 280-285, 326-331, 372-377, and 395-400. An aspartic acid and asparagine hydroxylation site is present at amino acids 321-332. An EGF-like domain cysteine pattern signature is present at amino acids 181-192.

[1243] Clone Athoc49b12, which encodes human TANGO 206, was deposited as EpT206 with the American Type Culture Collection (10801 University Boulevard, Manassas, Va. 20110-2209) on Apr. 21, 1999 and assigned Accession Number 207223. This deposit will be maintained under the terms of the Budapest Treaty on the International Recognition of the Deposit of Microorganisms for the Purposes of Patent Procedure. This deposit was made merely as a convenience for those of skill in the art and is not an admission that a deposit is required under 35 U.S.C. §112.

[1244] FIG. 119 depicts a hydropathy plot of human TANGO 206. The hydropathy plot indicates the presence of a signal sequence at the amino-terminus of human TANGO 206 and two transmembrane domains within human TANGO 206, suggesting that human TANGO 206 is a transmembrane protein.

[1245] Northern analysis of human TANGO 206 mRNA expression revealed strong expression in the heart, moderate expression in the skeletal muscle and weak expression in the kidney, brain, and placenta.

[1246] The human TANGO 206 gene maps to chromosome 3 between D3S3591 and D3S1283 based on the homology between a portion of human TANGO 206 and Genbank Accession Number G06979 (human STS WI-8719), which is reported to map to this position.

[1247] Mouse TANGO 206

[1248] A cDNA encoding mouse TANGO 206 was identified by analyzing the sequences of clones present in a mouse bone marrow cDNA library.

[1249] This analysis led to the identification of a clone, AtmMa206, encoding full-length mouse TANGO 206. The cDNA of this clone is 2093 nucleotides long (FIGS. 121A-121D; SEQ ID NO: 85). The 1260 nucleotide open reading frame of this cDNA (nucleotides 332-1591 of SEQ ID NO: 85) encodes a 420 amino acid protein (SEQ ID NO: 86).

[1250] In one embodiment of a nucleotide sequence of mouse TANGO 206, the nucleotide at position 457 is a guanine (G). In this embodiment, the amino acid at position 42 is glutamate (E). In another embodiment of a nucleotide sequence of mouse TANGO 206, the nucleotide at position 457 is a cytosine (C). In this embodiment, the amino acid at position 42 is aspartate (D). In another embodiment of a nucleotide sequence of mouse TANGO 206, the nucleotide at position 514 is a guanine (G). In this embodiment, the amino acid at position 61 is a glutamate (E). In another embodiment of a nucleotide sequence of mouse TANGO 206, the nucleotide at position 514 is a cytosine (C). In this embodiment, the amino acid at position 61 is aspartate (D). In another embodiment of a nucleotide sequence of mouse TANGO 206, the nucleotide at position 559 is an adenine (A). In this embodiment, the amino acid at position 76 is a glutamate (E). In another embodiment of a nucleotide sequence of mouse TANGO 206, the nucleotide at position 559 is a cytosine (C). In this embodiment, the amino acid at position 76 is aspartate (D).

[1251] The presence of a methionine residue at positions 282, 358, 363, 369, and 400 indicates that there can be alternative forms of mouse TANGO 206 of 139 amino acids, 63 amino acids, 58 amino acids, 52 amino acids, and 21 amino acids, respectively.

[1252] Another embodiment of the invention includes isolated nucleic acid molecules comprising a polynucleotide having a nucleotide sequence encoding the polypeptide having the mouse TANGO 206 polypeptide sequence, but lacking the N-terminal methionine residue. In this embodiment, the nucleotide sequence of mouse TANGO 206, nucleotides 335-1591 of SEQ ID NO: 85, encodes the mouse TANGO 206 amino acid sequence from amino acids 2-420 of SEQ ID NO: 86.

[1253] The signal peptide prediction program SIGNALP (Nielsen et al. (1997) Protein Engineering 10:1-6) predicted that mouse TANGO 206 includes a 29 amino acid signal peptide (amino acid 1 to about amino acid 29 of SEQ ID NO: 86) preceding the mature mouse TANGO 206 protein (corresponding to about amino acid 30 to amino acid 420 of SEQ ID NO: 86).

[1254] Mouse TANGO 206 is a transmembrane protein having a first extracellular domain which extends from about amino acid 30 to about amino acid 362, a first transmembrane domain which extends from about amino acid 363 to about amino acid 379, a cytoplasmic domain which extends from about amino acid 380 to about amino acid 386, a second transmembrane domain which extends from about amino acid 387 to about amino acid 405, and a second extracellular domain which extends from about amino acid 406 to about amino acid 420 of SEQ ID NO: 86.

[1255] Alterantively, mouse TANGO 206 is a transmembrane protein having a first cytoplasmic domain which extends from about amino acid 30 to about amino acid 362, a first transmembrane domain which extends from about amino acid 363 to about amino acid 379, an extracellular domain which extends from about amino acid 380 to about amino acid 386, a second transmembrane domain which extends from about amino acid 387 to about amino acid 405, and a second cytoplasmic domain which extends from about amino acid 406 to about amino acid 420 of SEQ ID NO: 86.

[1256] Mouse TANGO 206 that has not been post-translationally modified is predicted to have a molecular weight of 45.7 kDa prior to cleavage of its signal peptide and a molecular weight of 42.4 kDa subsequent to cleavage of its signal peptide.

[1257] Mouse TANGO 206 includes a laminin EGF-like domain at amino acids 168-211 and two EGF-like domains, one at amino acids 155-192 and one at amino acids 309-343.

[1258] In situ tissue screening was performed on mouse adult and embryonic tissue to analyze the expression of mouse TANGO 206 mRNA. In summary, expression during embryogenesis was observed ubiquitously in the central nervous system of the ages examined. It was also observed in the eye and the large ganglion of the head. Expression was also observed in the liver from E13.5 to E15.5. Expression pattern was multifocal in a pattern suggestive of megakaryocytes or haemopoietic islands. Expression was also observed in the skin of the earlier embryonic ages. Adult expression was observed ubiquitously in the brain and grey matter of the spinal cord. The adrenal gland and small intestine also had moderate to strong expression.

[1259] Human and mouse TANGO 206 sequences exhibit considerable similarity at the protein, nucleic acid, and open reading frame levels. An alignment (made using the ALIGN software (Myers and Miller (1989) CABIOS, ver. 2.0); BLOSUM 62 scoring matrix; gap penalties −12/−4), reveals a protein identity of 91.4%. The human and mouse TANGO 206 full length cDNAs are 84% identical, as assessed using the same software and parameters as indicated. In the respective ORFs, calculated in the same fashion as the full length cDNAs, human and mouse TANGO 206 are 89% identical. The nucleotide sequence and amino acid sequence alignments of human and mouse TANGO 206 can be found in FIGS. 122A-122D and FIGS. 123A-123B, respectively.

[1260] Clone AtmMa206, which encodes mouse TANGO 206, was deposited as EpTm206 with the American Type Culture Collection (10801 University Boulevard, Manassas, Va. 20110-2209) on Apr. 21, 1999 and assigned Accession Number 207221. This deposit will be maintained under the terms of the Budapest Treaty on the International Recognition of the Deposit of Microorganisms for the Purposes of Patent Procedure. This deposit was made merely as a convenience for those of skill in the art and is not an admission that a deposit is required under 35 U.S.C. §112.

[1261] Use of TANGO 206 Nucleic Acids, Polypeptides. and Modulators Thereof

[1262] TANGO 206 polypeptides, nucleic acids, and modulators thereof, can be used to modulate the function, morphology, proliferation and/or differentiation of cells in the tissues in which it is expressed. TANGO 206 includes an laminin EGF domain and an EGF-like domain. Proteins having such domains play a role in a wide variety of biological processes, including cholesterol uptake, blood coagulation, specification of cell fate. TANGO 206 polypeptides, nucleic acids, and modulators thereof can be used to modulate cell proliferation, morphogenesis, tissue repair and renewal, terminal differentiation, cell survival, and cell migration. They can be used to treat cancer, promote would healing (e.g., of the skin, cornea, or digestive mucosa), treat familia hypercholesterolemia, treat hemophilia B, treat Marfan syndrome, and treat protein S deficiency, and modulate an allergic or inflammatory response. TANGO 206 polypeptides, nucleic acids, and modulators thereof can be used to modulate acid secretion, modulate tropic effects on gastrointestinal mucosa, modulate mucosal adaptation, and modulate gastroduodenal cell migration and proliferation. Thus, such molecules can be used to protect gastric mucosa against injury and promote gastroduodenal ulcer healing.

[1263] As human TANGO 206 was originally found in a LPS stimulated human primary osteoblast library, TANGO 206 nucleic acids, proteins, and modulators thereof can be used to modulate the proliferation, differentiation, and/or function of cells that form bone matrix, e.g., osteoblasts and osteoclasts, and can be used to modulate the formation of bone matrix. Thus A259 nucleic acids, proteins, and modulators thereof can be used to treat cartilage and bone associated diseases and disorders, and can play a role in bone growth, formation, and remodeling. Examples of cartilage and bone associated diseases and disorders include e.g., bone cancer, achondroplasia, myeloma, fibrous dysplasia, scoliosis, osteoarthritis, osteosarcoma, and osteoporosis.

[1264] As mouse TANGO 206 was originally found in a bone marrow library, TANGO 206 nucleic acids, proteins, and modulators thereof can be used to modulate the proliferation, differentiation, and/or function of cells that appear in the bone marrow, e.g., stem cells (e.g., hematopoietic stem cells), and blood cells, e.g., erythrocytes, platelets, and leukocytes. Thus A259 nucleic acids, proteins, and modulators thereof can be used to treat bone marrow, blood, and hematopoietic associated diseases and disorders, e.g., acute myeloid leukemia, hemophilia, leukemia, anemia (e.g., sickle cell anemia), and thalassemia.

[1265] TANGO 206 polypeptides, nucleic acids, and modulators thereof, can be used to modulate the function, morphology, proliferation and/or differentiation of cells in the tissues in which it is expressed. Such molecules can be used to treat disorders associated with abnormal or aberrant metabolism or function of cells in the tissues in which it is expressed. Tissues in which TANGO 206 is expressed include, for example, heart, brain, skeletal muscle, placenta, CNS, liver, small intestine, adrenal gland, and the kidney.

[1266] In another example, TANGO 206 polypeptides, nucleic acids, or modulators thereof, can be used to treat disorders of the brain, such as cerebral edema, hydrocephalus, brain herniations, iatrogenic disease (due to, e.g., infection, toxins, or drugs), inflammations (e.g., bacterial and viral meningitis, encephalitis, and cerebral toxoplasmosis), cerebrovascular diseases (e.g., hypoxia, ischemia, and infarction, intracranial hemorrhage and vascular malformations, and hypertensive encephalopathy), and tumors (e.g., neuroglial tumors, neuronal tumors, tumors of pineal cells, meningeal tumors, primary and secondary lymphomas, intracranial tumors, and medulloblastoma), and to treat injury or trauma to the brain.

[1267] In another example, TANGO 206 polypeptides, nucleic acids, or modulators thereof, can be used to treat pancreatic disorders, such as pancreatitis (e.g., acute hemorrhagic pancreatitis and chronic pancreatitis), pancreatic cysts (e.g., congenital cysts, pseudocysts, and benign or malignant neoplastic cysts), pancreatic tumors (e.g., pancreatic carcinoma and adenoma), diabetes mellitus (e.g., insulin- and non-insulin-dependent types, impaired glucose tolerance, and gestational diabetes), or islet cell tumors (e.g., insulinomas, adenomas, Zollinger-Ellison syndrome, glucagonomas, and somatostatinoma).

[1268] As TANGO 206 exhibits expression in the heart, TANGO 206 nucleic acids, proteins, and modulators thereof can be used to treat cardiovascular disorders as described herein.

[1269] In another example, TANGO 206 polypeptides, nucleic acids, or modulators thereof, can be used to treat hepatic (liver) disorders, such as jaundice, hepatic failure, hereditary hyperbiliruinemias (e.g., Gilbert's syndrome, Crigler-Naijar syndromes and Dubin-Johnson and Rotor's syndromes), hepatic circulatory disorders (e.g., hepatic vein thrombosis and portal vein obstruction and thrombosis) hepatitis (e.g. chronic active hepatitis, acute viral hepatitis, and toxic and drug-induced hepatitis) cirrhosis (e.g., alcoholic cirrhosis, biliary cirrhosis, and hemochromatosis), or malignant tumors (e.g., primary carcinoma, hepatoblastoma, and angiosarcoma).

[1270] In another example, TANGO 206 polypeptides, nucleic acids, or modulators thereof, can be used to treat renal (kidney) disorders, such as glomerular diseases (e.g., acute and chronic glomerulonephritis, rapidly progressive glomerulonephritis, nephrotic syndrome, focal proliferative glomerulonephritis, glomerular lesions associated with systemic disease, such as systemic lupus erythematosus, Goodpasture's syndrome, multiple myeloma, diabetes, neoplasia, sickle cell disease, and chronic inflammatory diseases), tubular diseases (e.g., acute tubular necrosis and acute renal failure, polycystic renal diseasemedullary sponge kidney, medullary cystic disease, nephrogenic diabetes, and renal tubular acidosis), tubulointerstitial diseases (e.g., pyelonephritis, drug and toxin induced tubulointerstitial nephritis, hypercalcemic nephropathy, and hypokalemic nephropathy) acute and rapidly progressive renal failure, chronic renal failure, nephrolithiasis, vascular diseases (e.g., hypertension and nephrosclerosis, microangiopathic hemolytic anemia, atheroembolic renal disease, diffuse cortical necrosis, and renal infarcts), or tumors (e.g., renal cell carcinoma and nephroblastoma).

[1271] In another example, TANGO 206 polypeptides, nucleic acids, or modulators thereof, can be used to treat intestinal disorders, such as ischemic bowel disease, infective enterocolitis, Crohn's disease, benign tumors, malignant tumors (e.g., argentaffinomas, lymphomas, adenocarcinomas, and sarcomas), malabsorption syndromes (e.g., celiac disease, tropical sprue, Whipple's disease, and abetalipoproteinemia), obstructive lesions, hernias, intestinal adhesions, intussusception, or volvulus.

[1272] In another example, TANGO 206 polypeptides, nucleic acids, or modulators thereof, can be used to treat disorders of the adrenal cortex, such as hypoadrenalism (e.g., primary chronic or acute adrenocortical insufficiency, and secondary adrenocortical insufficiency), hyperadrenalism (Cushing's syndrome, primary hyperaldosteronism, adrenal virilism, and adrenal hyperplasia), or neoplasia (e.g., adrenal adenoma and cortical carcinoma).

[1273] Human TANGO 209

[1274] A cDNA encoding human TANGO 209 was identified by analyzing the sequences of clones present in a human osteoblast cDNA library.

[1275] This analysis led to the identification of a clone, Athoc22d3, encoding full-length human TANGO 209. The cDNA of this clone is 3117 nucleotides long (FIGS. 124A-124E; SEQ ID NO: 87). The 1338 nucleotide open reading frame of this cDNA (nucleotides 194-1531 of SEQ ID NO: 88) encodes a 446 amino acid protein (SEQ ID NO: 88).

[1276] In one embodiment of a nucleotide sequence of human TANGO 209, the nucleotide at position 388 is an adenine (A). In this embodiment, the amino acid at position 65 is glutamate (E). In another embodiment of a nucleotide sequence of human TANGO 209, the nucleotide at position 388 is a cytosine (C). In this embodiment, the amino acid at position 65 is aspartate (D) In another embodiment of a nucleotide sequence of human TANGO 209, the nucleotide at position 424 is a guanine (G). In this embodiment, the amino acid at position 77 is a glutamate (E). In another embodiment of a nucleotide sequence of human TANGO 209, the nucleotide at position 424 is a cytosine (C). In this embodiment, the amino acid at position 77 is aspartate (D). In another embodiment of a nucleotide sequence of human TANGO 209, the nucleotide at position 472 is an adenine (A). In this embodiment, the amino acid at position 93 is a glutamate (E). In another embodiment of a nucleotide sequence of human TANGO 209, the nucleotide at position 472 is a cytosine (C). In this embodiment, the amino acid at position 93 is aspartate (D).

[1277] The presence of a methionine residue at positions 324, and 410 indicates that there can be alternative forms of human TANGO 209 of 123 amino acids, and 37 amino acids, respectively.

[1278] Another embodiment of the invention includes isolated nucleic acid molecules comprising a polynucleotide having a nucleotide sequence encoding the polypeptide having the human TANGO 209 amino acid sequence, but lacking the N-terminal methionine residue. In this embodiment, the nucleotide sequence of human TANGO 209, nucleotides 197-1531, encodes the human TANGO 209 amino acid sequence from amino acids 2-446 of SEQ ID NO: 88.

[1279] The signal peptide prediction program SIGNALP (Nielsen et al. (1997) Protein Engineering 10:1-6) predicted that human TANGO 209 includes a 21 amino acid signal peptide (amino acid 1 to about amino acid 21 of SEQ ID NO: 88) preceding the mature human TANGO 209 protein (corresponding to about amino acid 22 to amino acid 446 of SEQ ID NO: 88).

[1280] Human TANGO 209 that has not been post-translationally modified is predicted to have a molecular weight of 49.7 kDa prior to cleavage of its signal peptide and a molecular weight of 47.3 kDa subsequent to cleavage of its signal peptide.

[1281] In one embodiment, a TANGO 209 protein contains a signal sequence of about amino acids 1-21. In certain embodiments, a TANGO 209 family member has the amino acid sequence, and the signal sequence is located at amino acids 1 to 19, 1 to 20, 1 to 21, 1 to 22 or 1 to 23. In such embodiments of the invention, the domains and the mature protein resulting from cleavage of such signal peptides are also included herein. For example, the cleavage of a signal sequence consisting of amino acids 1 to 21 results in a mature TANGO 209 protein corresponding to amino acids 22 to 446 of SEQ ID NO: 88. The signal sequence is normally cleaved during processing of the mature protein.

[1282] TANGO 209 family members can include a Kazal-type serine protease inhibitor domain. A consensus Kazal-type serine protease inhibitor domain has the sequence shown in the alignment depicted in FIG. 127, where the more conserved residues in the consensus sequence are indicated by uppercase letters and the less conserved residues inthe consensus sequence are indicated by lowercase letters. The Kazal-type serine protease inhibitor domain of TANGO 209 is located at amino acids 40-84 of SEQ ID NO: 88.

[1283] Human TANGO 209 includes thyroglobulin type 1 repeat domains at amino acids 109-153 and amino acids 237-281 of SEQ ID NO: 88. FIG. 126 depicts an alignment of the thyroglobulin type 1 repeat domains of human TANGO 209 with a consensus thyroglobulin type 1 repeat domain derived from a hidden Markov model. Human TANGO 209 includes a Kazal-type serine protease inhibitor domain at amino acids 40-84 of SEQ ID NO: 88. The thyroglobulin type 1 domain is present in HLA class II associate invariant chain, HLA class II associated invariant chain, and pancreatic carcinoma marker proteins GA733-1 and GA733-2.

[1284] FIG. 127 depicts an alignment of the Kazal-type serine protease inhibitor domain of human TANGO 209 with a consensus Kazal-type serine protease domain derived from a hidden Markov model.

[1285] N-glycosylation sites are present at amino acids 206-209 and 362-365. In human TANGO 209, cAMP and cGMP-dependent protein kinase phosphorylation sites are present at amino acids 94-97, 380-383, 426-429. Protein kinase C phosphorylation sites are present at amino acids 150-152, 167-169, 208-210, 265-267, 273-275, 284-286, 335-337, 424-426, 429-431, and 438-440. Casein kinase II phosphorylation sites are present at amino acids 62-65, 156-159, 214-217, 222-225, 274-277, 315-318, 339-342, 346-349, 363-366, and 405-408. A tyrosine kinase phosphorylation site is present at amino acids 89-96. N-myristoylation sites are present at amino acids 143-148, 166-171, and 303-308. An amidation site is present at amino acids 367-370. EF-hand calcium-binding domains are present at amino acids 360-372 and 397-409. A thyroglobulin type-1 repeat signature is present at amino acids 109-138.

[1286] Clone Athoc22d3, which encodes human TANGO 209, was deposited as EpT209 with the American Type Culture Collection (10801 University Boulevard, Manassas, Va. 20110-2209) on Apr. 21, 1999 and assigned Accession Number 207223. This deposit will be maintained under the terms of the Budapest Treaty on the International Recognition of the Deposit of Microorganisms for the Purposes of Patent Procedure. This deposit was made merely as a convenience for those of skill in the art and is not an admission that a deposit is required under 35 U.S.C. §112.

[1287] FIG. 125 depicts a hydropathy plot of human TANGO 209. The hydropathy plot indicates that human TANGO 209 has a signal sequence at its amino terminus, suggesting that human TANGO 209 is a secreted protein.

[1288] Northern analysis of human TANGO 209 mRNA expression revealed very high expression in the heart, high expression in the skeletal muscle and pancreas, and moderate expression in the placenta, lung and kidney.

[1289] The human gene for TANGO 209 was mapped on radiation hybrid panels to the long arm of chromosome 6, in the region q26-27. Flanking markers for this region are ATA22G07 and WI-9405. The MLLT4 (myeloid/lymphoid or mixed lineage leukemia) locus also maps to this region of the human chromosome. The PLG (plasminogen), VIP (vasoactive intestinal peptide), LPA (apolipoprotein Lp), MLLT4 (myeloid/lymphoid or mixed lineage leukemia), and THBS2 (thrombospondin 2) genes also map to this region of the human chromosome. This region is syntenic to mouse chromosome 17. The qk (quaking), T (brachyury), and het (head tilt) loci also map to this region of the mouse chromosome. The plg (lasminogen), qk (quaking), and het (head tilt) genes also map to this region of the mouse chromosome.

[1290] Mouse TANGO 209

[1291] A cDNA encoding mouse TANGO 209 was identified by analyzing the sequences of clones present in a mouse osteoblast cDNA library.

[1292] This analysis led to the identification of a clone, Atmoa99h11, encoding full-length mouse TANGO 209. The cDNA of this clone is 2810 nucleotides long (FIGS. 128A-128E; SEQ ID NO: 89). The 1341 nucleotide open reading frame of this cDNA (nucleotides 187 to 1527 of SEQ ID NO: 89) encodes a 447 amino acid protein (SEQ ID NO: 90).

[1293] In one embodiment of a nucleotide sequence of mouse TANGO 209 the nucleotide at position 381 is a guanine (G). In this embodiment, the amino acid at position 65 is glutamate (E). In another embodiment of a nucleotide sequence of mouse TANGO 209, the nucleotide at position 381 is a cytosine (C). In this embodiment, the amino acid at position 65 is aspartate (D). In another embodiment of a nucleotide sequence of mouse TANGO 209, the nucleotide at position 417 is an guanine (G). In this embodiment, the amino acid at position 77 is a glutamate (E). In another embodiment of a nucleotide sequence of mouse TANGO 209, the nucleotide at position 417 is a cytosine (C). In this embodiment, the amino acid at position 77 is aspartate (D). In another embodiment of a nucleotide sequence of mouse TANGO 209, the nucleotide at position 465 is a guanine (G). In this embodiment, the amino acid at position 93 is a glutamate (E). In another embodiment of a nucleotide sequence of mouse TANGO 209, the nucleotide at position 465 is a cytosine (C). In this embodiment, the amino acid at position 93 is aspartate (D).

[1294] The presence of a methionine residue at positions 324, and 398 indicate that there can be alternative forms of mouse TANGO 209 of 124 amino acids, and 50 amino acids, respectively.

[1295] Another embodiment of the invention includes isolated nucleic acid molecules comprising a polynucleotide having a nucleotide sequence encoding the polypeptide having the mouse TANGO 209 polypeptide sequence, but lacking the N-terminal methionine residue. In this embodiment, the nucleotide sequence of mouse TANGO 209, nucleotides 190 to 1527 of SEQ ID NO: 89, encodes the mouse TANGO 209 amino acid sequence comprising amino acids 2-487 of SEQ ID NO: 90.

[1296] The signal peptide prediction program SIGNALP (Nielsen et al. (1997) Protein Engineering 10:1-6) predicted that mouse TANGO 209 includes a 21 amino acid signal peptide (amino acid 1 to about amino acid 21 of SEQ ID NO: 90) preceding the mature mouse TANGO 209 protein (corresponding to about amino acid 22 to amino acid 447 of SEQ ID NO: 90).

[1297] Mouse TANGO 209 that has not been post-translationally modified is predicted to have a molecular weight of 49.9 kDa prior to cleavage of its signal peptide and a molecular weight of 47.5 kDa subsequent to cleavage of its signal peptide.

[1298] Mouse TANGO 209 includes thyroglobulin type 1 repeat domains at amino acids 109-153 and amino acids 237-281 of SEQ ID NO: 90 and a Kazal-type serine protease inhibitor domain at amino acids 40-84 of SEQ ID NO: 90.

[1299] In situ expression analysis of TANGO 209 expression in adult mice revealed expression in the brain (hippocampus, dentate gyrus, and frontal cortex), thymus (multifocal expression), kidney (medulla and capsule), and adrenal gland (capsule). Relatively high level, widespread, multifocal expression was observed in skeletal muscle. Multifocal expression was observed in the diaphragm. Relatively high level expression was observed in the spleen (non-follicular). Expression was observed in the bladder, where expression was highest in muscle tissue. Expression was observed in the small intestine and colon (smooth muscle, not villi). Expression was also observed in large vessels of the liver. High level, multifocal expression was observed in the heart.

[1300] Human and mouse TANGO 209 sequences exhibit considerable similarity at the protein, nucleic acid, and open reading frame levels. An alignment (made using the ALIGN software (Myers and Miller (1989) CABIOS, ver. 2.0); BLOSUM 62 scoring matrix; gap penalties −12/−4), reveals a protein identity of 94.6%. The human and mouse TANGO 209 full length cDNAs are 77.7% identical, as assessed using the same software and parameters as indicated (without the BLOSUM 62 scoring matrix). In the respective ORFs, calculated in the same fashion as the full length cDNAs, human and mouse TANGO 209 are 84.4% identical. The nucleotide sequence and amino acid sequence alignments of human and mouse TANGO 209 can be found in FIGS. 129A-129D and FIGS. 130A-130B, respectively.

[1301] Use of TANGO 209 Nucleic Acids, Polypeptides, and Modulators Thereof

[1302] TANGO 209 polypeptides, nucleic acids, and modulators thereof, can be used to modulate the function, morphology, proliferation and/or differentiation of cells in the tissues in which it is expressed. TANGO 209 polypeptides, nucleic acids, and modulators thereof can be used to treat disorders involving inappropriate activity of a serine protease and disorders of cellular migration, proliferation, and differentiation.

[1303] As human TANGO 209 was originally found in a LPS stimulated human primary osteoblast library, TANGO 209 nucleic acids, proteins, and modulators thereof can be used to modulate the proliferation, differentiation, and/or function of cells that form bone matrix, e.g., osteoblasts and osteoclasts, and can be used to modulate the formation of bone matrix. Thus, TANGO 209 nucleic acids, proteins, and modulators thereof can be used to treat cartilage and bone associated diseases and disorders, and can play a role in bone growth, formation, and remodeling. Examples of cartilage and bone associated diseases and disorders include e.g., bone cancer, achondroplasia, myeloma, fibrous dysplasia, scoliosis, osteoarthritis, osteosarcoma, and osteoporosis.

[1304] TANGO 209 polypeptides, nucleic acids, and modulators thereof, can be used to modulate the function, morphology, proliferation and/or differentiation of cells in the tissues in which it is expressed. Such molecules can be used to treat disorders associated with abnormal or aberrant metabolism or function of cells in the tissues in which it is expressed. Tissues in which TANGO 209 is expressed include, for example, brain, skeletal muscle, thymus, liver, adrenal gland, and the kidney.

[1305] In another example, TANGO 209 polypeptides, nucleic acids, or modulators thereof, can be used to treat disorders of the brain, such as cerebral edema, hydrocephalus, brain herniations, iatrogenic disease (due to, e.g., infection, toxins, or drugs), inflammations (e.g., bacterial and viral meningitis, encephalitis, and cerebral toxoplasmosis), cerebrovascular diseases (e.g., hypoxia, ischemia, and infarction, intracranial hemorrhage and vascular malformations, and hypertensive encephalopathy), and tumors (e.g., neuroglial tumors, neuronal tumors, tumors of pineal cells, meningeal tumors, primary and secondary lymphomas, intracranial tumors, and medulloblastoma), and to treat injury or trauma to the brain.

[1306] In another example, TANGO 209 polypeptides, nucleic acids, or modulators thereof, can be used to treat hepatic (liver) disorders, such as jaundice, hepatic failure, hereditary hyperbiliruinemias (e.g., Gilbert's syndrome, Crigler-Naijar syndromes and Dubin-Johnson and Rotor's syndromes), hepatic circulatory disorders (e.g., hepatic vein thrombosis and portal vein obstruction and thrombosis) hepatitis (e.g., chronic active hepatitis, acute viral hepatitis, and toxic and drug-induced hepatitis) cirrhosis (e.g., alcoholic cirrhosis, biliary cirrhosis, and hemochromatosis), or malignant tumors (e.g. primary carcinoma, hepatoblastoma, and angiosarcoma).

[1307] In another example, TANGO 209 polypeptides, nucleic acids, or modulators thereof, can be used to treat renal (kidney) disorders, such as glomerular diseases (e.g., acute and chronic glomerulonephritis, rapidly progressive glomerulonephritis, nephrotic syndrome, focal proliferative glomerulonephritis, glomerular lesions associated with systemic disease, such as systemic lupus erythematosus, Goodpasture's syndrome, multiple myeloma, diabetes, neoplasia, sickle cell disease, and chronic inflammatory diseases), tubular diseases (e.g., acute tubular necrosis and acute renal failure, polycystic renal diseasemedullary sponge kidney, medullary cystic disease, nephrogenic diabetes, and renal tubular acidosis), tubulointerstitial diseases (e.g., pyelonephritis, drug and toxin induced tubulointerstitial nephritis, hypercalcemic nephropathy, and hypokalemic nephropathy) acute and rapidly progressive renal failure, chronic renal failure, nephrolithiasis, vascular diseases (e.g., hypertension and nephrosclerosis, microangiopathic hemolytic anemia, atheroembolic renal disease, diffuse cortical necrosis, and renal infarcts), or tumors (e.g., renal cell carcinoma and nephroblastoma).

[1308] In another example, TANGO 209 polypeptides, nucleic acids, or modulators thereof, can be used to treat intestinal disorders, such as ischemic bowel disease, infective enterocolitis, Crohn's disease, benign tumors, malignant tumors (e.g., argentaffinomas, lymphomas, adenocarcinomas, and sarcomas), malabsorption syndromes (e.g., celiac disease, tropical sprue, Whipple's disease, and abetalipoproteinemia), obstructive lesions, hernias, intestinal adhesions, intussusception, or volvulus.

[1309] In another example, TANGO 209 polypeptides, nucleic acids, or modulators thereof, can be used to treat disorders of the adrenal cortex, such as hypoadrenalism (e.g., primary chronic or acute adrenocortical insufficiency, and secondary adrenocortical insufficiency), hyperadrenalism (Cushing's syndrome, primary hyperaldosteronism, adrenal virilism, and adrenal hyperplasia), or neoplasia (e.g., adrenal adenoma and cortical carcinoma).

[1310] Tango 244

[1311] A cDNA encoding TANGO 244 was identified by analyzing the sequences of clones present in a human fetal lung cDNA library.

[1312] This analysis led to the identification of a clone, Athua62f9, encoding full-length human TANGO 244. The cDNA of this clone is 1513 nucleotides long (FIG. 131; SEQ ID NO: 91). The 486 nucleotide open reading frame of this cDNA (nucleotide 85 to nucleotide 570 of SEQ ID NO: 91) encodes a 162 amino acid protein (SEQ ID NO: 92).

[1313] The signal peptide prediction program SIGNALP (Nielsen et al., 1997, Protein Engineering 10:1-6) predicted that human TANGO 244 includes a 26 amino acid signal peptide (amino acid 1 to about amino acid 26 of SEQ ID NO: 92) preceding the mature human TANGO 244 protein (corresponding to about amino acid 27 to amino acid 162 of SEQ ID NO: 92).

[1314] In one embodiment, a TANGO 244 protein contains a signal peptide of about amino acids 1 to 26 (1 to 24, 1 to 25, 1 to 27, or 1 to 28) of SEQ ID NO: 92.

[1315] Human TANGO 244 is a transmembrane protein having an extracellular domain which extends from about amino acid 27 to about amino acid 119, a transmembrane domain which extends from about amino acid 120 to about amino acid 142, and a cytoplasmic domain which extends from about amino acid 143 to amino acid 162 of SEQ ID NO: 92.

[1316] Alternatively, in another embodiment, a human TANGO 244 protein contains an extracellular domain at amino acid residues 143 to 162, transmembrane domains at amino acid residues 120 to 142, and a cytoplasmic domain at amino acid residues 27 to 119 of SEQ ID NO: 92.

[1317] TANGO 244 family members can also include an immunoglobulin domain. Immunoglobulin domains are present in a variety of proteins and are involved in protein-protein and protein-ligand interaction at the cell surface. A consensus hidden Markov model immunoglobulin domain has the sequence. This consensus sequence is shown in FIG. 133 where the more conserved residues in the consensus sequence are indicated by uppercase letters and the less conserved residues in the consensus sequence are indicated by lowercase letters. Human TANGO 244 includes a immunoglobulin domain at amino acids 37 to 97 of SEQ ID NO: 92.

[1318] In some embodiments of the invention, the domains and the mature protein resulting from the cleavage of such signal peptides are also included herein. For example, the cleavage of a signal peptide consisting of amino acids 1 to 26 results in a mature TANGO 244 protein corresponding to amino acids 27-162 of SEQ ID NO: 92. The signal peptide is normally cleaved during possessing of the mature protein.

[1319] Human TANGO 244 that has not been post-translationally modified is predicted to have a molecular weight of 16.8 kDa prior to cleavage of its signal peptide and a molecular weight of 14.2 kDa subsequent to cleavage of its signal peptide.

[1320] Human TANGO 244 includes an immunoglobulin domain at amino acids 37 to 97 of SEQ ID NO: 92. FIG. 133 depicts an alignment of the immunoglobulin domain of human TANGO 244 with a consensus hidden Markov model immunoglobulin domain.

[1321] Within human TANGO 244, an N-glycosylation site is present at amino acids 84 to 87. A protein kinase C phosphorylation sites is present at amino acids 92 to 94. N-myristylation sites are present at amino acids 11 to 16, 37 to 42, 91 to 96, 102 to 107, and 122 to 127. An amidation site is present at amino acids 148 to 151.

[1322] Clone Athua62f9, which encodes human TANGO 244, was deposited as EpT244 with the American Type Culture Collection (ATCC® 10801 University Boulevard, Manassas Va. 20110-2209) on Apr. 21, 1999 and assigned Accession Number 207223. This deposit will be maintained under the terms of the Budapest Treaty on the International Recognition of the Deposit of Microorganisms for the Purposes of Patent Procedure. This deposit was made merely as a convenience for those of skill in the art and is not an admission that a deposit is required under 35 U.S.C. §112.

[1323] FIG. 132 depicts a hydropathy plot of human TANGO 244. The hydropathy plot indicates that human TANGO 244 has a signal peptide at its amino terminus and an internal hydrophobic region, suggesting that TANGO 244 is a transmembrane protein.

[1324] Northern blot analysis of human TANGO 244 expression revealed that human TANGO 244 is expressed in the colon, kidney, liver, and lung.

[1325] Human TANGO 244 has sequence homology to human CTH (Marcuz et al., 1998, Eur. J. Immunol. 28:4094-4104; Genbank Accession Number AF061022). FIG. 134 depicts an alignment of the amino acid sequence of human TANGO 244 and the amino acid sequence of human CTH. In this alignment, the sequences are 48.6% identical overall. However, there is a substantial region of complete identity. TANGO 244 may act as a immunoglobulin superfamily-type receptor.

[1326] Use of TANGO 244 Nucleic Acids, Polypeptides, and Modulators Thereof

[1327] TANGO 244 polypeptides, nucleic acids, and modulators thereof can be used to modulate the function, morphology, proliferation and/or differentiation of cells in the tissues in which they are expressed. Such molecules can be used to treat disorders associated with abnormal or aberrant metabolism or function of cells in the tissues in which they are expressed. Tissues in which TANGO 244 is expressed include, for example, the colon, kidney, liver, and lung. Such disorders include but are limited to lymphoma, leukemia, amyloidosis, scleroderma, mastocytosis.

[1328] In one example, TANGO 244 polypeptides, nucleic acids, or modulators thereof can be used to treat colonic disorders, such as congenital anomalies (e.g. megacolon and imperforate anus), idiopathic disorders (e.g., diverticular disease and melanosis coli), vascular lesions (e.g., ischemic colistis, hemorrhoids, angiodysplasia), inflammatory diseases (e.g., idiopathic ulcerative colitis, pseudomembranous colitis, and lymphopathia venereum), tumors (e.g., hyperplastic polyps, adenomatous polyps, bronchogenic cancer, colonic carcinoma, squamous cell carcinoma, adenoacanthomas, sarcomas, lymphomas, argentaffinomas, carcinoids, and melanocarcinomas) and Crohn's Disease.

[1329] In another example, TANGO 244 polypeptides, nucleic acids, or modulators thereof can be used to treat renal disorders, such as glomerular diseases (e.g., acute and chronic glomerulonephritis, rapidly progressive glomerulonephritis, nephrotic syndrome, focal proliferative glomerulonephritis, glomerular lesions associated with systemic disease, such as systemic lupus erythematosus, Goodpasture's syndrome, multiple myeloma, diabetes, neoplasia, sickle cell disease, and chronic inflammatory diseases), tubular diseases (e.g., acute tubular necrosis and acute renal failure, polycystic renal disease, medullary sponge kidney, medullary cystic disease, nephrogenic diabetes, and renal tubular acidosis), tubulointerstitial diseases (e.g., pyelonephritis, drug and toxin induced tubulointerstitial nephritis, hypercalcemic nephropathy, and hypokalemic nephropathy) acute and rapidly progressive renal failure, chronic renal failure, nephrolithiasis, gout, vascular diseases (e.g., hypertension and nephrosclerosis, microangiopathic hemolytic anemia, atheroembolic renal disease, diffuse cortical necrosis, and renal infarcts), or tumors (e.g., renal cell carcinoma and nephroblastoma).

[1330] In another example, TANGO 244 polypeptides, nucleic acids, or modulators thereof can be used to treat hepatic (liver) disorders, such as jaundice, hepatic failure, hereditary hyperbiliruinemias (e.g., Gilbert's syndrome, Crigler-Naijar syndromes and Dubin-Johnson and Rotor's syndromes), hepatic circulatory disorders (e.g., hepatic vein thrombosis and portal vein obstruction and thrombosis) hepatitis (e.g., chronic active hepatitis, acute viral hepatitis, and toxic and drug-induced hepatitis) cirrhosis (e.g., alcoholic cirrhosis, biliary cirrhosis, and hemochromatosis), or malignant tumors (e.g., primary carcinoma, hepatoma, hepatoblastoma, liver cysts and angiosarcoma).

[1331] In another example, TANGO 244 polypeptides, nucleic acids, or modulators thereof can be used to treat pulmonary (lung) disorders, such as atelectasis, cystic fibrosis, rheumatoid lung disease, pulmonary congestion or edema, chronic obstructive airway disease (e.g., emphysema, chronic bronchitis, bronchial asthma, and bronchiectasis), diffuse interstitial diseases (e.g., sarcoidosis, pneumoconiosis, hypersensitivity pneumonitis, bronchiolitis Goodpasture's syndrome, idiopathic pulmonary hemosiderosis, idiopathic pulmonary fibrosis, pulmonary alveolar proteinosis, desquamative interstitial pneumonitis, chronic interstitial pneumonia, fibrosing alveolitis, hamman-rich syndrome, pulmonary eosinophilia, diffuse interstitial fibrosis, Wegener's granulomatosis, lymphomatoid granulomatosis, and lipid pneumonia), or tumors (e.g., bronchogenic carcinoma, bronchiolovlveolar carcinoma, bronchial carcinoid, hamartoma, and mesenchymal tumors).

[1332] Because TANGO 244 includes immunoglobulin domains and has homology to human CTH, TANGO 244 polypeptides, nucleic acids, and modulators thereof can be used to treat disorders involving an immune, allergic or autoimmune response (e.g., arthritis, multiple sclerosis, meningitis, encephalitis, atherosclerosis, or infection).

[1333] Further, in light of TANGO 244's pattern of expression in humans, TANGO 244 expression can be utilized as a marker for specific tissues (e.g., tissues of the colon, kidney, liver, or lung) and/or cells (e.g., colon, renal, hepatic, or pulmonary) in which TANGO 244 is expressed. TANGO 244 nucleic acids can also be utilized for chromosomal mapping.

[1334] Tango 246

[1335] A cDNA encoding human TANGO 246 was identified by analyzing the sequences of clones present in a human fetal spleen cDNA library.

[1336] This analysis led to the identification of a clone, Athsa34d2, encoding full-length human TANGO 246. The cDNA of this clone is 1992 nucleotides long (FIGS. 135A-135B; SEQ ID NO: 93). The 987 nucleotide open reading frame of this cDNA (nucleotide 94 to nucleotide 1080 of SEQ ID NO: 93) encodes a 329 amino acid protein (SEQ ID NO: 94).

[1337] Human TANGO 246 has a hydrophobic domain which extends from about amino acid 306 to about amino acid 323. This could represent a transmembrane domain or an internal signal peptide. This domain follows a domain which extends from about amino acid 1 to about amino acid 305 and is followed by a domain which extends from about amino acid 324 to amino acid 329 of SEQ ID NO: 94.

[1338] TANGO 246 family members can also include a cell cycle protein domain. A consensus hidden Markov model cell cycle protein domain has the sequence. This consensus sequence is shown in FIG. 137 where the more conserved residues in the consensus sequence are indicated by uppercase letters and the less conserved residues in the consensus sequence are indicated by lowercase letters. Human TANGO 246 includes a cell cycle protein domain at amino acids 27 to 215 of SEQ ID NO: 94. Among the proteins which have a cell cycle protein domain are CDC3, CDC10, and CDC11, all of which are important for regulation of the cell cycle. Many proteins which include this domain are GTP binding proteins.

[1339] In addition, TANGO 246 family members can also include an ABC transporter domain. A consensus hidden Markov model ABC transporter protein domain has the sequence,. This consensus sequence is shown in FIG. 138 where the more conserved residues in the consensus sequence are indicated by uppercase letters. and the less transporter protein domain of TANGO 246 is located at amino acids 30 to 192 of SEQ ID NO: 94. A number of proteins having an ABC transporter protein domain act as active transporters of small hydrophilic molecules (e.g., ions) across cell membranes, including intracellular membranes. In eukaryotes, ABC transporter protein domains are present in multidrug resistance proteins. These protein are involved in extrusion of drugs from cells and play a key role in drug resistance. This domain is also present in cystic fibrosis transmembrane conductance regulator (CFTR), a protein that likely acts as a chloride ion transporter. Many proteins having an ABC transporter domain are ATP binding proteins.

[1340] Human TANGO 246 that has not been post-translationally modified is predicted to have a molecular weight of 37.5 kDa.

[1341] Within human TANGO 246, a cAMP and cGMP-dependent protein kinase phosphorylation site is present at amino acids 71 to 74. Protein kinase C phosphorylation sites are present at amino acids 66 to 68, 75 to 77, 99 to 101, 134 to 136, 154 to 156, and 222 to 224. Casein kinase HI phosphorylation sites are present at amino acids 75 to 78, 99 to 102, 127 to 130, 154 to 157, 194 to 197, and 299 to 302. A tyrosine kinase phosphorylation site is present at amino acids 214 to 221. N-myristylation sites are present at amino acids 40 to 45, 88 to 93, and 219 to 224. An ATP/GTP-binding site motif A is present at amino acids 37 to 44. An amidation site is present at amino acids 51 to 54.

[1342] Clone Athsa34d2, which encodes human TANGO 246, was deposited as EpT246 with the American Type Culture Collection (ATCC® 10801 University Boulevard, Manassas Va. 20110-2209) on Apr. 21, 1999 and assigned Accession Number 207223. This deposit will be maintained under the terms of the Budapest Treaty on the International Recognition of the Deposit of Microorganisms for the Purposes of Patent Procedure. This deposit was made merely as a convenience for those of skill in the art and is not an admission that a deposit is required under 35 U.S.C. §112.

[1343] FIG. 136 depicts a hydropathy plot of human TANGO 246. The hydropathy plot indicates the presence of a hydrophobic domain within human TANGO 246, suggesting that human TANGO 246 is either a transmembrane protein or a secreted protein which employs an internal signal peptide.

[1344] Human TANGO 246 has homology to Arabidopsis thaliana AIG1, a gene which is involved in resistance response (Genbank Accession Number AAC49289: Reuber and Ausubel, 1996, Plant Cell 8:241-249), and Nicotiana tabacum NTGP4 (Genbank Accession Number AAD09518). FIG. 155 depicts an alignment of the amino acid sequence of human TANGO 246 and the amino acid sequence of Arabidopsis thaliana AIG1 (Genbank Accession Number AAC49289. In this alignment, the proteins are 31.2% identical.

[1345] Use of TANGO 246 Nucleic Acids, Polypeptides and Modulators Thereof

[1346] TANGO 246 polypeptides, nucleic acids, and modulators thereof can be used to modulate the function, morphology, proliferation and/or differentiation of cells in the tissues in which they are expressed.

[1347] TANGO 246 includes an ABC transporter domain. Proteins having such a domain are involved in disorders of transport of small molecules across cell membranes. Proteins having an ABC transporter domain are known to be involved in cystic fibrosis, hyperinsulinemia, adrenoleukodystrophy, familial intrahepatic cholestasis, sideroblatic anemia and ataxia, Stargardt disease, multidrug resistance, and hyperbilirubinemia II/Dubin-Johnson syndrome. Thus, TANGO 246 polypeptides, nucleic acids, and modulators thereof can be used to treat these and other disorders.

[1348] TANGO 246 includes a cell cycle protein domain. Proteins having such a domain are involved in regulation of the cell cycle. Thus, TANGO 246 polypeptides, nucleic acids, and modulators thereof can be used to treat disorders such as Alzheimer's disease, vascular restinosis, polycystic kidney disease, transplant rejection, chronic liver disease, and cancer.

[1349] Further, in light of TANGO 246's presence in a human fetal spleen cDNA library, TANGO 246 expression can be utilized as a marker for specific tissues (e.g., lymphoid tissues such as the thymus and spleen) and/or cells (e.g., lymphocytes and splenic) in which TANGO 246 is expressed. TANGO 246 nucleic acids can also be utilized for chromosomal mapping.

[1350] Tango 275

[1351] cDNA encoding human TANGO 275 was identified by analyzing the sequences of clones present in a human pituitary gland cDNA library.

[1352] This analysis led to the identification of a clone, Athbb19d1, encoding full-length human TANGO 275. The cDNA of this clone is 4225 nucleotides long (FIGS. 139A-139D; SEQ ID NO: 95). The 3867 nucleotide open reading frame of this cDNA (nucleotide 65 to nucleotide 3931 of SEQ ID NO: 95) encodes a 1289 amino acid protein (SEQ ID NO: 96).

[1353] The signal peptide prediction program SIGNALP (Nielsen et al., 1997, Protein Engineering 10: 1-6) predicted that human TANGO 275 includes a 29 amino acid signal peptide (amino acid 1 to about amino acid 29 of SEQ ID NO: 96) preceding the mature human TANGO 275 protein (corresponding to about amino acid 30 to amino acid 1289 of SEQ ID NO: 96).

[1354] Human TANGO 275 that has not been post-translationally modified is predicted to have a molecular weight of 137.9 kDa prior to cleavage of its signal peptide and a molecular weight of 135.3 kDa subsequent to cleavage of its signal peptide.

[1355] In one embodiment, a TANGO 275 protein contains a signal peptide of about amino acids 1 to 29 (1 to 27, 1 to 28, 1 to 30, 1 to 31) of SEQ ID NO: 96.

[1356] TANGO 275 family members can include an EGF-like domain. A consensus hidden Markov model EGF-like domain has the sequence shown in the alignments depicted in FIGS. 141A-141B, where the more conserved residues in the consensus sequence are indicated by uppercase letters and the less conserved residues in the consensus sequence are indicated by lowercase letters. Human TANGO 275 includes EFG-like domains at amino acids 99 to 126, 345 to 380, 564 to 600, 606 to 644, 650 to 687, 693 to 728, 734 to 769, 775 to 810, 816 to 850, 856 to 893, 983 to 1020, 1026 to 1061, 1072 to 1107, 1203 to 1238, and 1244 to 1283 of SEQ ID NO: 96. One or more EGF-like domains (e.g., 1, 2, 4, 8, 13, 17, or 44 copies) are found in the extracellular domain of a wide range of proteins of transmembrane and wholly secreted proteins having diverse function. The consensus EGF-like domain sequence includes six cysteines, all of which are thought to be involved in disulfide bonds.

[1357] TANGO 275 family members can include a transforming growth factor β binding protein-like domains (TB domains). A consensus hidden Markov model TB domain has the amino acid sequence. This consensus sequence is shown in FIG. 142 where the more conserved residues in the consensus sequence are indicated by uppercase letters and the less conserved residues in the consensus sequence are indicated by lowercase letters. Human TANGO 275 includes TB domains at amino acids 273 to 316, 399 to 440, 913 to 956, and 1132 to 1177 of SEQ ID NO: 96. A TB domain is found in matrix fibrils (Yuan et al., 1997, EMBOJ 16:6659-66).

[1358] TANGO 275 family members can include a metallothionein domain. A consensus hidden Markov model metallothionein domain has the amino acid sequence. This consensus sequence is shown in FIG. 143 where the more conserved residues in the consensus sequence are indicated by uppercase letters and the less conserved residues in the consensus sequence are indicated by lowercase letters. Human TANGO 275 includes a metallothionein domain at amino acids 694 to 708 of SEQ ID NO: 96. Metallothionein domains are found in proteins which bind heavy metals (e.g., copper, zinc, cadmium, and nickel) through thiolate bonds.

[1359] Human TANGO 275 includes EFG-like domains at amino acids 99 to 126, 345 to 20 380, 564 to 600, 606 to 644, 650 to 687, 693 to 728, 734 to 769, 775 to 810, 816 to 850, 856 to 893, 983 to 1020, 1026 to 1061, 1072 to 1107, 1203 to 1238, and 1244 to 1283 of SEQ ID NO: 96. An alignment of each of the EGF-like domains of human TANGO 275 with a consensus hidden Markov model EGF-like domain is shown in FIGS. 141A-141B.

[1360] Human TANGO 275 includes transforming growth factor β binding protein like domains (TB domains) at amino acids 273 to 316, 399 to 440, 913 to 956, and 1132 to 1177 of SEQ ID NO: 96. An alignment of each of the TB domains of human TANGO 275 with a consensus hidden Markov model TB domain is shown in FIG. 142.

[1361] Human TANGO 275 includes a metallothionein domain at amino acids 694 to 708 of SEQ ID NO: 96. An alignment of the metallothionein domain of human TANGO 275 with a consensus hidden Markov model metallothionein domain is shown in FIG. 143.

[1362] N-glycosylation sites are present at amino acids 75 to 78, 335 to 338, 831 to 834, 922 to 925, and 1261 to 1264 of SEQ ID NO: 96.

[1363] Clone Athbb19d1, which encodes human TANGO 275, was deposited as EpT275 with the American Type Culture Collection (ATCC® 10801 University Boulevard, Manassas Va. 20110-2209) on Apr. 21, 1999 and assigned Accession Number 207220. This deposit will be maintained under the terms of the Budapest Treaty on the International Recognition of the Deposit of Microorganisms for the Purposes of Patent Procedure. This deposit was made merely as a convenience for those of skill in the art and is not an admission that a deposit is required under 35 U.S.C. §112.

[1364] FIG. 140 depicts a hydropathy plot of human TANGO 275. The hydropathy plot indicates that human TANGO 275 has a signal peptide at its amino terminus, suggesting that human TANGO 275 is a secreted protein.

[1365] Transcript analysis suggests that there are several splice variants of human TANGO 275.

[1366] Human TANGO 275 appears to be the human homolog of a mouse latent transforming growth factor-β binding protein 3 (LTBP-3; Yin et al., J. Biol. Chem. 270:10147-60, 1995; Genbank Accession Number RL40459; PCT Application WO 95/22611; GENSEQ Accession Number R79475).

[1367] FIGS. 144A-144H depicts an alignment of the nucleotide sequence of human TANGO 275 and the nucleotide sequence of mouse LTBP-3 (Genbank Accession Number L40459). This alignment was created using ALIGN (version 2.0; PAM120 scoring matrix; gap length penalty of 12; gap penalty of 4). In this alignment, the sequences are 77.1% identical.

[1368] FIGS. 145A-145C depicts an alignment of the amino acid sequence of human TANGO 275 and the amino acid sequence of mouse LTBP-3 (GENSEQ R79475). This alignment was created using ALIGN (version 2.0; PAM120 scoring matrix; gap length penalty of 12; gap penalty of 4). In this alignment, the sequences are 82.8% identical.

[1369] Northern blot analysis of human TANGO 275 expression revealed that human TANGO 275 is expressed at a high level in the heart and at a moderate level in the brain, placenta, lung, liver, skeletal muscle, kidney and pancreas.

[1370] A mouse TANGO 275 cDNA was identified. The cDNA of this clone is 4376 nucleotides long (FIGS. 146A-146G; SEQ ID NO: 97). The 3759 nucleotide open reading frame of this cDNA, nucleotides, encodes a 1253 amino acid protein (SEQ ID NO: 98). FIGS. 156A-156B depicts an alignment of the amino acid sequence encoded by this mouse TANGO 275 cDNA clones and the amino acid sequence of mouse LTBP-3 (GENSEQ Accession Number R79475). This alignment was created using ALIGN (version 2.0; PAM120 scoring matrix, gap length penalty of 12; gap penalty of 4). In this alignment, the sequences are 97.4% identical.

[1371] Use of TANGO 275 Nucleic Acids Polypeptides. and Modulators Thereof

[1372] TANGO 275 polypeptides, nucleic acids, and modulators thereof can be used to modulate the function, morphology, proliferation and/or differentiation of cells in the tissues in which they are expressed. Such molecules can be used to treat disorders associated with abnormal or aberrant metabolism or function of cells in the tissues in which they are expressed. Tissues in which TANGO 275 is expressed include, for example, pancreas, adrenal medulla, adrenal cortex, kidney, thyroid, testis, stomach, heart, brain, liver, placenta, lung, skeletal muscle, or small intestine.

[1373] As TANGO 275 exhibits expression in the heart, TANGO 275 polypeptides, nucleic acids, or modulators thereof can be used to treat heart and cardiovascular disorders, such as ischemic heart disease as described herein.

[1374] In another example, TANGO 275 polypeptides, nucleic acids, or modulators thereof can be used to treat disorders of the brain, such as cerebral edema, hydrocephalus, brain herniations, iatrogenic disease (due to, e.g., infection, toxins, or drugs), inflammations (e.g., bacterial and viral meningitis, encephalitis, and cerebral toxoplasmosis), cerebrovascular diseases (e.g., hypoxia, ischemia, and infarction, intracranial hemorrhage and vascular malformations, and hypertensive encephalopathy), and tumors (e.g., neuroglial tumors, neuronal tumors, tumors of pineal cells, meningeal tumors, primary and secondary lymphomas, intracranial tumors, and medulloblastoma), and to treat injury or trauma to the brain (e.g., spinal cord injuries, infarction, infection, malignancy, exposure to toxic agents, nutritional deficiency, paraneoplastic syndromes), degenerative nerve diseases (including but not limited to Alzheimer's disease, Parkinson's disease, Huntington's Chorea, Gilles de la Tourette's syndrome, amyotrophic lateral sclerosis, progressive supra-nuclear palsy, and other dementias), and neuropsychiatric disorders (including schizophrenia, schizoaffective disorder, attention deficit disorder, dysthymic disorder, major depressive disorder, mania, obsessive-compulsive disorder, psychoactive substance use disorders, anxiety, panic disorder, as well as bipolar affective disorder, e.g., severe bipolar affective disorder, bipolar affective disorder with hypomania and major depression).

[1375] In another example, TANGO 275 polypeptides, nucleic acids, or modulators thereof can be used to treat placental disorders, such as toxemia of pregnancy (e.g., preeclampsia and eclampsia), placentitis, or spontaneous abortion.

[1376] In another example, TANGO 275 polypeptides, nucleic acids, or modulators thereof can be used to treat pulmonary (lung) disorders, such as atelectasis, cystic fibrosis, rheumatoid lung disease, pulmonary congestion or edema, chronic obstructive airway disease (e.g., emphysema, chronic bronchitis, bronchial asthma, and bronchiectasis), diffuse interstitial diseases (e.g., sarcoidosis, pneumoconiosis, hypersensitivity pneumonitis, Goodpasture's syndrome, idiopathic pulmonary hemosiderosis, pulmonary alveolar proteinosis, desquamative interstitial pneumonitis, chronic interstitial pneumonia, fibrosing alveolitis, hamman-rich syndrome, pulmonary eosinophilia, diffuse interstitial fibrosis, Wegener's granulomatosis, lymphomatoid granulomatosis, and lipid pneumonia), or tumors (e.g., bronchogenic carcinoma, bronchiolovlveolar carcinoma, bronchial carcinoid, hamartoma, and mesenchymal tumors).

[1377] In another example, TANGO 275 polypeptides, nucleic acids, or modulators thereof can be used to treat hepatic disorders, such as jaundice, hepatic failure, liver cysts, chronic liver disease, hereditary hyperbiliruinemias (e.g., Gilbert's syndrome, Crigler-Naijar syndromes and Dubin-Johnson and Rotor's syndromes), hepatic circulatory disorders (e.g., hepatic vein thrombosis and portal vein obstruction and thrombosis) hepatitis (e.g. chronic active hepatitis, acute viral hepatitis, and toxic and drug-induced hepatitis) cirrhosis (e.g., alcoholic cirrhosis, biliary cirrhosis, and hemochromatosis), or malignant tumors (e.g., primary carcinoma, hepatoblastoma, and angiosarcoma).

[1378] In another example, TANGO 275 polypeptides, nucleic acids, or modulators thereof can be used to treat disorders of skeletal muscle, such as muscular dystrophy (e.g., Duchenne muscular dystrophy, Becker Muscular Dystrophy, Emery-Dreifuss muscular dystrophy, Limb-Girdle muscular dystrophy, Facioscapulohumeral muscular dystrophy, myotonic dystrophy, oculopharyngeal muscular dystrophy, distal muscular dystrophy, and congenital muscular dystrophy), motor neuron diseases (e.g., amyotrophic lateral sclerosis, infantile progressive spinal muscular atrophy, intermediate spinal muscular atrophy, spinal bulbar muscular atrophy, and adult spinal muscular atrophy), myopathies (e.g., inflammatory myopathies (e.g., dermatomyositis and polymyositis), myotonia congenita, paramyotonia congenita, central core disease, nemaline myopathy, myotubular myopathy, and periodic paralysis), and metabolic diseases of muscle (e.g., phosphorylase deficiency, acid maltase deficiency, phosphofructokinase deficiency, Debrancher enzyme deficiency, mitochondrial myopathy, camitine deficiency, carnitine palmityl transferase deficiency, phosphoglycerate kinase deficiency, phosphoglycerate mutase deficiency, lactate dehydrogenase deficiency, and myoadenylate deaminase deficiency).

[1379] In another example, TANGO 275 polypeptides, nucleic acids, or modulators thereof can be used to treat renal disorders, such as glomerular diseases (e.g., acute and chronic glomerulonephritis, rapidly progressive glomerulonephritis, nephrotic syndrome, focal proliferative glomerulonephritis, glomerular lesions associated with systemic disease, such as systemic lupus erythematosus, Goodpasture's syndrome, multiple myeloma, diabetes, neoplasia, sickle cell disease, and chronic inflammatory diseases), tubular diseases (e.g., acute tubular necrosis and acute renal failure, polycystic renal diseasemedullary sponge kidney, medullary cystic disease, nephrogenic diabetes, and renal tubular acidosis), tubulointerstitial diseases (e.g., pyelonephritis, drug and toxin induced tubulointerstitial nephritis, hypercalcemic nephropathy, and hypokalemic nephropathy) acute and rapidly progressive renal failure, chronic renal failure, nephrolithiasis, vascular diseases (e.g., hypertension and nephrosclerosis, microangiopathic hemolytic anemia, atheroembolic renal disease, diffuse cortical necrosis, and renal infarcts), or tumors (e.g. renal cell carcinoma and nephroblastoma).

[1380] In another example, TANGO 275 polypeptides, nucleic acids, or modulators thereof can be used to treat pancreatic disorders, such as pancreatitis (e.g., acute hemorrhagic pancreatitis and chronic pancreatitis), pancreatic cysts (e.g., congenital cysts, pseudocysts, and benign or malignant neoplastic cysts), pancreatic tumors (e.g., pancreatic carcinoma and adenoma), diabetes mellitus (e.g., insulin- and non-insulin-dependent types, impaired glucose tolerance, and gestational diabetes), or islet cell tumors (e.g., insulinomas, adenomas, Zollinger-Ellison syndrome, glucagonomas, and somatostatinoma).

[1381] TANGO 275 includes an EGF-like domain. Proteins having such domains play a role in a wide variety of biological processes, including cholesterol uptake, blood coagulation, and specification of cell fate. Thus, TANGO 275 polypeptides, nucleic acids, and modulators thereof can be used modulate these processes. TANGO 275 polypeptides, nucleic acids, and modulators thereof can be used to modulate cell proliferation, morphogenesis, tissue repair and renewal, terminal differentiation, cell survival, and cell migration. They can be used to treat cancer, promote wound healing (e.g., of the skin, cornea, or mucosa), and modulate an allergic or inflammatory response.

[1382] TANGO 275 includes a TB domain. Proteins having this domain are commonly associated with extracellular matrix fibrils. TANGO 275 polypeptides, nucleic acids, and modulators thereof can be used to modulate matrix formation and degradation and to treat disorders of the connective tissue, e.g., Marfan syndrome.

[1383] As a transforming growth factor-β binding protein, TANGO 275 can interact with transforming growth factor-β (TGF-β). In general, transforming growth factor-β binding proteins (LTBP) bind to TGF-β to form latent growth factor complexes (large latent complexes). LTBP are important regulators of TGF-β activity. LTBP are thought to facilitate the normal assembly and secretion of large latent complexes, target latent TGF-β to certain connective tissues, modulate the activity of large latent complexes, and target latent TGF-β to the cell surface. Given that TANGO 275 can modulate TGF-β activity, TANGO 275 polypeptides, nucleic acids, and modulators of TANGO 275 expression or activity can be used to treat connective tissue and bone disorders such as bone fracture, osteoporosis, and osteogenesis imperfecta. In addition, such compounds can be used to promote bone repair, promote bone regeneration, and improve bone implant bonding. Thus, TANGO 275 polypeptides, nucleic acids, and modulators thereof can be used to modulate various aspects of bone repair and regeneration, including, e.g., clot formation, clot dissolution, removal of damaged tissue, growth of granulation tissue, cartilage growth and turnover, formation of callus tissue, remodeling, formation of trabecular bone, and formation of cortical bone.

[1384] Further, in light of TANGO 275's pattern of expression in humans, TANGO 275 expression can be utilized as a marker for specific tissues (e.g., cardiovascular tissue such as the heart) and/or cells (e.g., cardiac) in which TANGO 275 is expressed. TANGO 275 nucleic acids can also be utilized for chromosomal mapping.

[1385] Mango 245

[1386] A cDNA encoding MANGO 245 was identified by analyzing the sequences of clones present in a human adult brain cDNA library.

[1387] This analysis led to the identification of a clone, Alhbab165e5, encoding full-length human MANGO 245. The cDNA of this clone is 1356 nucleotides long (FIGS. 147A-147B; SEQ ID NO: 99). The 1044 nucleotide open reading frame of this cDNA, nucleotide 105 to nucleotide 1148, encodes a 348 amino acid protein (SEQ ID NO: 100).

[1388] The signal peptide prediction program SIGNALP (Nielsen et al., 1997, Protein Engineering 10:1-6) predicted that human MANGO 245 includes a 16 amino acid signal peptide (amino acid 1 to about amino acid 16 of SEQ ID NO: 100) preceding the mature human MANGO 245 protein (corresponding to about amino acid 17 to amino acid 348 of SEQ ID NO: 100).

[1389] Human MANGO 245 is a transmembrane protein having an extracellular domain which extends from about amino acid 17 to about amino acid 141, a transmembrane domain which extends from about amino acid 142 to about amino acid 158, and a cytoplasmic domain which extends from about amino acid 159 to amino acid 348 of SEQ ID NO: 100.

[1390] Human MANGO 245 that has not been post-translationally modified is predicted to have a molecular weight of 37.9 kDa prior to cleavage of its signal peptide and a molecular weight of 36.3 kDa subsequent to cleavage of its signal peptide.

[1391] In one embodiment, a MANGO 245 protein contains a signal peptide of amino acids 1 to 16 (1 to 14, 1 to 15, 1 to 17, 1 to 18)of SEQ ID NO: 94.

[1392] MANGO 245 family members can also include a CIq domain. A consensus hidden Markov model CIq domain has the amino acid sequence shown in the alignments depicted in FIG. 151 where the more conserved residues in the consensus sequence are indicated by uppercase letters and the less conserved residues in the consensus sequence are indicated by lowercase letters. Human MANGO 245 includes CIq domains at amino acids 31 to 156 and amino acids 178 to 294. Monkey MANGO 245 includes CIq domains at amino acids 31 to 156 and amino acids 178 to 311. Mouse MANGO 245 includes a CIq domain at amino acids 30 to 155. CIq domains are found in wholly secreted or membrane bound proteins that are short-chain collagens and collagen-like molecules. The domain likely forms ten β-strands interspersed by β-turns and/or loops.

[1393] Within MANGO 245, protein kinase C phosphorylation sites are present at amino acids 244 to 246 and 264 to 266. Casein kinase II phosphorylation sites are present at amino acids 38 to 41 and 298 to 301. N-myristylation sites are present at amino acids 66 to 71, 113 to 118, 145 to 150, 219 to 224, and 295 to 300.

[1394] Clone Alhbab165e5, which encodes human MANGO 245, was deposited as EpM245 with the American Type Culture Collection (ATCC^{ò} 10801 University Boulevard, Manassas Va. 20110-2209) on Apr. 21, 1999 and assigned Accession Number 207223. This deposit will be maintained under the terms of the Budapest Treaty on the International Recognition of the Deposit of Microorganisms for the Purposes of Patent Procedure. This deposit was made merely as a convenience for those of skill in the art and is not an admission that a deposit is required under 35 U.S.C. §112.

[1395] FIG. 148 depicts a hydropathy plot of human MANGO 245. The hydropathy plot indicates that human MANGO 245 has a signal peptide at its amino terminus and an internal hydrophobic region, suggesting that human MANGO 245 is a transmembrane protein.

[1396] Northern blot analysis of human MANGO 245 expression revealed that human MANGO 245 is expressed at a relatively high level in the cerebellum, frontal lobe, and putamen; at a moderate level in the cerebral cortex, the medulla, occipital lobe, and temporal lobe; and a relatively low level in the spinal cord. Additional Northern blot analysis revealed the human MANGO 245 is expressed in amygdala, caudate nucleus, hippocampus, brain, substantia nigra, and subthalamic nucleus.

[1397] A cDNA encoding monkey MANGO 245 was identified by analyzing the sequences of clones present in a monkey cDNA library.

[1398] This analysis led to the identification of a clone, Alkbd75h1, encoding full-length monkey MANGO 245. The cDNA of this clone is 1416 nucleotides long (FIGS. 149A-149B; SEQ ID NO: 101). The 987 nucleotide open reading frame of this cDNA, nucleotide 250 to nucleotide 1236, encodes a 329 amino acid protein (SEQ ID NO: 102).

[1399] The signal peptide prediction program SIGNALP (Nielsen et al., 1997, Protein Engineering 10:1-6) predicted that monkey MANGO 245 includes a 16 amino acid signal peptide (amino acid 1 to about amino acid 16 of SEQ ID NO: 102) preceding the mature monkey MANGO 245 protein (corresponding to about amino acid 17 to amino acid 329 of SEQ ID NO: 102).

[1400] Monkey MANGO 245 that has not been post-translationally modified is predicted to have a molecular weight of 35.2 kDa prior to cleavage of its signal peptide and a molecular weight of 33.6 kDa subsequent to cleavage of its signal peptide.

[1401] Monkey MANGO 245 includes CIq domains at amino acids 31 to 156 and amino acids 178 to 311 of SEQ ID NO: 102. FIG. 152 depicts alignments of the CIq domains of monkey MANGO 245 with a consensus hidden Markov model CIq domain.

[1402] FIG. 150 depicts an alignment of the amino acid sequence of human MANGO 245 and the amino acid sequence of monkey MANGO 245. This alignment was created using ALIGN (version 2.0; PAM120 scoring matrix; gap length penalty of 12; gap penalty of 4). In this alignment, the sequences are 84.8% identical overall.

[1403] Clone Alkbd75h1, which encodes monkey MANGO 245, was deposited as EpK245 with the American Type Culture Collection (ATTCC® 10801 University Boulevard, Manassas Va. 20110-2209) on Jun. 18, 1999 and assigned Accession Number PTA-248. This deposit will be maintained under the terms of the Budapest Treaty on the International Recognition of the Deposit of Microorganisms for the Purposes of Patent Procedure. This deposit was made merely as a convenience for those of skill in the art and is not an admission that a deposit is required under 35 U.S.C. §112.

[1404] In addition, a mouse MANGO 245 was identified. The cDNA of this clone is 625 nucleotides long (FIG. 153; SEQ ID NO: 103). The open reading frame of this cDNA is begins at nucleotide 29. Mouse MANGO 245 includes a CIq domain at amino acids 30 to 155 of SEQ ID NO: 104.

[1405] Within mouse MANGO 245, protein kinase C phosphorylation sites are present at amino acids 64 to 66 and 178 to 180. N-myristylation sites are present at amino acids 112 to 117 and 144 to 149. A casein kinase II phosphorylation site is present at amino acids 37 to 40. An N-glycosylation site is present at amino acids 88 to 91.

[1406] FIGS. 154A-154B depicts an alignment of 697 of the 1356 nucleotides of the human MANGO 245 sequence (nucleotide 51 to nucleotide 748 of SEQ ID NO: 99) with the nucleotide sequence of mouse MANGO 245. This alignment was created using BESTFIT (BLOSUM 62 scoring matrix; gap open penalty of 12; frame shift penalty of 5; gap extend penalty of 4). In this alignment, the sequences are 89.6% identical overall.

[1407] Use of MANGO 245 Nucleic Acids, Polypeptides. and Modulators Thereof

[1408] MANGO 245 polypeptides, nucleic acids, and modulators thereof can be used to modulate the function, morphology, proliferation and/or differentiation of cells in the tissues in which they are expressed. MANGO 245 is expressed in the brain and central nervous system. Thus, MANGO 245 polypeptides, nucleic acids, and modulators thereof can be used to treat CNS disorders such as Alzheimer's disease, senile dementia, Huntington's disease, amyotrophic lateral sclerosis, and Parkinson's disease, as well as Gilles de la Tourette's syndrome, autonomic function disorders such as hypertension and sleep disorders, and neuropsychiatric disorders that include, but are not limited to schizophrenia, schizoaffective disorder, attention deficit disorder, dysthymic disorder, major depressive disorder, mania, obsessive-compulsive disorder, psychoactive substance use disorders, anxiety, panic disorder, as well as bipolar affective disorder, e.g., severe bipolar affective (mood) disorder (BP-I), bipolar affective (mood) disorder with hypomania and major depression (BP-II).

[1409] MANGO 245 includes a CIq domain. Known proteins having this domain play a role complement activation and autoimmune disorders. The CIq domain is also found in collagens and collagen-like molecules. MANGO 245 polypeptides, nucleic acids, and modulators thereof can be used to treat disorders of collagen assembly and degradation.

[1410] Further, in light of MANGO 245's pattern of expression in humans, MANGO 245 expression can be utilized as a marker for specific tissues (e.g., brain) and/or cells (e.g., cerebellum, frontal lobe, or putamen) in which MANGO 245 is expressed. MANGO 245 nucleic acids can also be utilized for chromosomal mapping.

[1411] Intercept 340

[1412] A cDNA encoding INTERCEPT 340 was identified by analyzing the sequences of clones present in a human fetal spleen cDNA library.

[1413] This analysis led to the identification of a clone, jthsa102b12, encoding full-length human INTERCEPT 340. The cDNA of this clone is 3284 nucleotides long (FIG. 157A-157C; SEQ ID NO: 105). The 723 nucleotide open reading frame of this cDNA (nucleotides 1222-1944 of SEQ ID NO: 105) encodes a 241 amino acid protein (SEQ ID NO: 106).

[1414] Human INTERCEPT 340 that has not been post-translationally modified is predicted to have a molecular weight of 27.2 kDa.

[1415] INTERCEPT 340 family members can include at least one, preferably two, and more preferably three fibrillar collagen C-terminal domains (also referred to herein as “COLF domains”). As used herein, a “fibrillar collagen C-terminal domain” refers to an amino acid sequence of about 15 to 65, preferably about 20-60, more preferably about 25, 31-58 amino acids in length. Consensus hidden Markov model COLF domains are depicted in FIG. 159. The more conserved residues in the consensus sequence are indicated by uppercase letters and the less conserved residues in the consensus sequence are indicated by lowercase letters. A comparison of the C-terminal sequences of fibrillar collagens, collagens X, VIII, and the collagen C1q revealed a conserved cluster of amino acid residues having aromatic side chains (e.g., tyrosine, phenylalanine, tryptophan, histidine) that exhibited marked similarities in hydrophilicity profiles between the different collagens, despite a low level of sequence similarity. These similarities in hydrophilicity profiles within their C-termini suggest that these proteins may adopt a common tertiary structure and that the conserved cluster of aromatic residues in this domain may be involved in C-terminal trimerization. The COLF domains of INTERCEPT 340 extend from about amino acids 58 to 116, 126 to 151, and 186 to 217 (FIG. 159). By alignment of the amino acid sequence of the consensus hidden Markov model COLF amino acid sequence with the amino acid sequence of the COLF domains of INTERCEPT 340, conserved amino acid residues having aromatic side chains can be found. For example, conserved tyrosine, tryptophan and phenylalanine residues can be found at amino acid 87, 88 and 133.

[1416] Human INTERCEPT 340 includes three fibrillar collagen C-terminal (COLF) domains at amino acids 58-116; amino acids 126-151; and amino acids 186-217 of SEQ ID NO: 106. FIG. 159 depicts alignments of each of the COLF domains of human INTERCEPT 340 with consensus hidden Markov model COLF domains. In one embodiment, INTERCEPT 340 is a secreted protein. In another embodiment, INTERCEPT 340 is a membrane-associated protein.

[1417] An N-glycosylation site is present at amino acids 105-108. A glycosaminoaglycan attachment site is present at amino acids 161-164. Protein kinase C phosphorylation sites are present at amino acids 57-59, 152-154, and 227-229. A tyrosine kinase phosphorylation site is present at amino acids 81-87. Casein kinase II phosphorylation sites are present at amino acids 36-39, 120-123 and 181-184. N-myristylation sites are present at amino acids 109-114 and 164-169.

[1418] Clone jthsa102b12, which encodes human INTERCEPT 340, was deposited as a composite deposit having a designation EpI340 with the American Type Culture Collection (ATCC® 10801 University Boulevard, Manassas Va. 20110-2209) on Jun. 18, 1999 and assigned Accession Number PTA-250. A description of the deposit conditions is set forth in the section entitled “Deposit of Clones” below. This deposit will be maintained under the terms of the Budapest Treaty on the International Recognition of the Deposit of Microorganisms for the Purposes of Patent Procedure. This deposit was made merely as a convenience for those of skill in the art and is not an admission that a deposit is required under 35 U.S.C. §112.

[1419] FIG. 158 depicts a hydropathy plot of human INTERCEPT 340.

[1420] Use of INTERCEPT 340 Nucleic Acids Polypeptides and Modulators Thereof

[1421] INTERCEPT 340 includes three fibrillar collagen C-terminal domains. Proteins having such domains play a role in modulating connective tissue formation and/or maintenance, and thus can influence a wide variety of biological processes, including assembly into fibrils; strengthening and organization of the extracellular matrix; shaping of tissues and cells; modulation of cell migration; and/or modulation of signal transduction pathways. Because INTERCEPT 340 includes fibrillar collagen C-terminal domains, INTERCEPT 340 polypeptides, nucleic acids, and modulators thereof can be used to treat connective tissue disorders, including a skin disorder and/or a skeletal disorder (e.g., Marfan syndrome and osteogenesis imperfecta); cardiovascular disorders including hyperproliferative vascular diseases (e.g., hypertension, vascular restenosis and atherosclerosis), ischemia reperfusion injury, cardiac hypertrophy, coronary artery disease, myocardial infarction, arrhythmia, cardiomyopathies, and congestive heart failure); and/or hematopoietic disorders (e.g., myeloid disorders, lymphoid malignancies, T cell disorders).

[1422] As INTERCEPT 340 was originally found in a fetal spleen library, INTERCEPT 340 nucleic acids, proteins, and modulators thereof can be used to modulate the function, survival, morphology, migration, proliferation and/or differentiation of cells that form the spleen, e.g., cells of the splenic connective tissue, e.g., splenic smooth muscle cells and/or endothelial cells of the splenic blood vessels. INTERCEPT 340 nucleic acids, proteins, and modulators thereof can also be used to modulate the proliferation, differentiation, and/or function of cells that are processed, e.g., regenerated or phagocytized within the spleen, e.g., erythrocytes and/or B and T lymphocytes and macrophages. Thus INTERCEPT 340 nucleic acids, proteins, and modulators thereof can be used to treat spleen, e.g., the fetal spleen, associated diseases and disorders. Examples of splenic diseases and disorders include e.g., splenic lymphoma and/or splenomegaly, and/or phagocytotic disorders, e.g., those inhibiting macrophage engulfment of bacteria and viruses in the bloodstream.

[1423] Further, in light of INTERCEPT 340's presence in a human fetal spleen cDNA library, INTERCEPT 340 expression can be utilized as a marker for specific tissues (e.g., lymphoid tissues such as the spleen) and/or cells (e.g. splenic) in which INTERCEPT 340 is expressed. INTERCEPT 340 nucleic acids can also be utilized for chromosomal mapping.

[1424] Mango 003

[1425] A cDNA encoding human MANGO 003 was identified by analyzing the sequences of clones present in a human thyroid cDNA library.

[1426] This analysis led to the identification of a clone, jthYa030d03, encoding full-length human MANGO 003. The cDNA of this clone is 3169 nucleotides long (FIGS. 160A-160C; SEQ ID NO: 107). The 1512 nucleotide open reading frame of this cDNA (nucleotide 57 to nucleotide 1568 of SEQ ID NO: 107) encodes a 504 amino acid protein (SEQ ID NO: 108).

[1427] Human MANGO 003 that has not been post-translationally modified is predicted to have a molecular weight of 54.5 kDa prior to cleavage of its signal peptide (52.1 kDa after cleavage of its signal peptide).

[1428] The signal peptide prediction program SIGNALP (Nielsen et al., 1997, Protein Engineering 10:1-6) predicted that human MANGO 003 includes a 24 amino acid signal peptide at amino acid 1 to about amino acid 24 preceding the mature human MANGO 003 protein which corresponds to about amino acid 25 to amino acid 504 of SEQ ID NO: 108.

[1429] Human MANGO 003 is a transmembrane protein having an extracellular domain which extends from about amino acid 25 to about amino acid 374, a transmembrane domain which extends from about amino acid 375 to about amino acid 398, and a cytoplasmic domain which extends from about amino acid 399 to amino acid 504 of SEQ ID NO: 108.

[1430] Alternatively, in another embodiment, a human MANGO 003 protein contains an extracellular domain which extends from about amino acid 399 to amino acid 504, a transmembrane domain which extends from about amino acid 375 to about amino acid 398, and a cytoplasmic domain which extends from about amino acid 25 to about amino acid 374 of SEQ ID NO: 108.

[1431] MANGO 003 family members can include at least one, preferably two, and more preferably three immunoglobulin domains. As used herein, an “immunoglobulin domain” (also referred to herein as “Ig”) refers to an amino acid sequence of about 45 to 85, preferably about 55-80, more preferably about 57, 58, or 78, 79 amino acids in length. Preferably, the immunoglobulin domains have a bit score for the alignment of the sequence to the Ig family Hidden Markov Model (HMM) of at least 10, preferably 20-30, more preferably 22-40, more preferably 40-50, 50-75, 75-100, 100-200 or greater. The Ig family HMM has been assigned the PFAM Accession PF00047. Consensus hidden Markov model immunoglobulin domains are shown FIG. 162 and 179. The more conserved residues in the consensus sequence are indicated by uppercase letters and the less conserved residues in the consensus sequence are indicated by lowercase letters. Immunoglobulin domains are present in a variety of proteins (including secreted and membrane-associated proteins). Membrane-associated proteins may be involved in protein-protein, and protein-ligand interaction at the cell surface, and thus may influence diverse activities including cell surface recognition and/or signal transduction. The immunoglobulin domains of MANGO 003 extend from about amino acids 44 to 101, 165 to 223, and 261 to 240 (FIG. 162). The immunoglobulin domain of TANGO 354 extend from about amino acids 33 to 110 (FIG. 179).

[1432] Human MANGO 003 includes three immunoglobulin domains at amino acids 44-101; amino acids 165-223; and amino acids 261-340 of SEQ ID NO: 108. FIG. 162 depicts alignments of each of the immunoglobulin domains of MANGO 003 with a consensus hidden Markov model immunoglobulin domain.

[1433] MANGO 003 family member can include a neurotransmitter-gated ion channel domain. As used herein, a “neurotransmitter-gated ion channel domain” refers to an amino acid sequence of about 5 to 20, preferably about 7 to 12, more preferably about 9 to 10 amino acids in length. The neurotransmitter-gated ion channel domain HMM has been assigned the PFAM Accession PF00065. A consensus hidden Markov model neurotransmitter-gated ion channel domain contain the sequence shown in FIG. 163. The more conserved residues in the consensus sequence are indicated by uppercase letters and the less conserved residues in the consensus sequence are indicated by lowercase letters. The neurotransmitter-gated ion channel domains of MANGO 003 extend from about amino acids 388 to 397 of SEQ ID NO: 108.

[1434] In one embodiment, a MANGO 003 family member includes three immunoglobulin domains and a neurotransmitter-gated ion channel domain. In another embodiment, a MANGO 003 family member includes three immunoglobulin domains, a neurotransmitter-gated ion channel domain and a transmembrane domain. In yet another embodiment, a MANGO 003 family member includes three immunoglobulin domains, a neurotransmitter-gated ion channel domain, a transmembrane domain and an N-terminal extracellular domain. In another embodiment, a MANGO 003 family member includes three immunoglobulin domains, a neurotransmitter-gated ion channel domain, a transmembrane domain, an N-terminal extracellular domain and a C-terminal cytoplasmic domain. In yet another embodiment, a MANGO 003 family member includes three immunoglobulin domains, a neurotransmitter-gated ion channel domain, a transmembrane domain, an N-terminal extracellular domain, a C-terminal cytoplasmic domain, and a signal peptide.

[1435] Human MANGO 003 includes a neurotransmitter gated ion channel domain at amino acids 388-397 of SEQ ID NO: 108. FIG. 163 depicts an alignment of the neurotransmitter gated ion channel domain of human MANGO 003 with a neurotransmitter gated ion channel domain derived from a hidden Markov model.

[1436] N-glycosylation sites are present at amino acids 111-114, 231-234, 255-258, and 293-296. A cAMP and cGMP-dependent protein kinase phosphorylation site is present at amino acids 202-205. Protein kinase C phosphorylation sites are present at amino acids 44-48, 167-169, 207-209, 216-218, 220-222, 224-226, 233-235, 347-349, and 422-424. Cas kinase II phosphorylation sites are present at amino acids 192-195, 256-259, 294-297, 313-316, 422-425, and 490-493. Tyrosine kinase phosphorylation sites are present at amino acids 212-219 and 329-336. N-myristylation sites are present at amino acids 95-100, 228-233, 261-266, 317-322, 334-339, 382-387, and 443-448.

[1437] Clone jthYa030d03, which encodes human MANGO 003, was deposited as a composite deposit having a designation EpthLa6a1 with the American Type Culture Collection (ATTCC® 10801 University Boulevard, Manassas Va. 20110-2209) on Mar. 27, 1999 and assigned Accession Number 207178. This deposit will be maintained under the terms of the Budapest Treaty on the International Recognition of the Deposit of Microorganisms for the Purposes of Patent Procedure. This deposit was made merely as a convenience for those of skill in the art and is not an admission that a deposit is required under 35 U.S.C. §112.

[1438] FIG. 161 depicts a hydropathy plot of human MANGO 003. The hydropathy plot indicates the presence of a hydrophobic domain within human MANGO 003, suggesting that human MANGO 003 is a transmembrane protein.

[1439] A cDNA encoding mouse MANGO 003 was identified by analyzing the sequences of clones present in a mouse choroid plexus cDNA library.

[1440] This analysis led to the identification of a clone, jfmjf004c11, encoding partial mouse MANGO 003. The cDNA of this clone is 626 nucleotides long (FIGS. 164A-164B; SEQ ID NO: 109). The 626 nucleotide open reading frame of this cDNA, nucleotides 1-626, encodes a 208 amino acid protein (SEQ ID NO: 110).

[1441] Northern blot analysis using the mouse clone jfmjf004c11 revealed strong expression of the mouse MANGO 003 gene in the mouse liver, skeletal muscle and kidney. Moderate expression was detected in the heart, lung and testis, and lower levels of expression were detected in the mouse brain. No expression was detected in the spleen.

[1442] Mouse MANGO 003 that has not been post-translationally modified is predicted to have a molecular weight of 22.3 kDa.

[1443] Mouse MANGO 003 is a transmembrane protein having an extracellular domain which extends from about amino acid 1 to about amino acid 73, a transmembrane domain which extends from about amino acid 74 to about amino acid 96, and a cytoplasmic domain which extends from about amino acid 97 to amino acid 208 of SEQ ID NO: 110.

[1444] An N-glycosylation site is present at amino acids 190-193. Protein kinase C phosphorylation sites are present at amino acids 44-46, 98-100, 119-121, and 197-199. Casein kinase II phosphorylation sites are present at amino acids 10-13, and 119-122. A tyrosine kinase phosphorylation site is present at amino acids 26-33. N-myristylation sites are present at amino acids 14-19, 31-36, and 79-84.

[1445] FIG. 165 depicts a hydropathy plot of mouse MANGO 003. The hydropathy plot indicates the presence of a hydrophobic domain within human MANGO 003, suggesting that human MANGO 003 is a transmembrane protein.

[1446] A global alignment between the nucleotide sequence of the open reading frame (ORF) of human MANGO 003 and the nucleotide sequence of the open reading frame of mouse MANGO 003 revealed a 31.1% identity (FIGS. 183A-183C). The global alignment was performed using the ALIGN program version 2.0 u (Matrix file used: pam 120.mat, gap penalties of −12/−4 with a global alignment score of −1212; Myers and Miller, 1989 CABIOS 4:11-7).

[1447] A local alignment between the nucleotide sequence of human MANGO 003 and the nucleotide sequence of mouse MANGO 003 revealed a 62.8% identity over nucleotides 970-2080 of the human MANGO 003 sequence (nucleotides 10-1070 of mouse MANGO 003) (FIGS. 184A-184B). The local alignment was performed using the L-ALIGN program version 2.0 u54 July 1996 (Matrix file used: pam 120.mat, gap penalties of −12/−4 with a score of 3241; Huang and Miller, 1991, Adv. AppL. Math. 12:373-81).

[1448] A global alignment between the amino acid sequence of human MANGO 003 and the amino acid sequence of mouse MANGO 003 revealed a 30.1% identity (FIG. 185). The global alignment was performed using the ALIGN program version 2.0 u (Matrix file used: pam 120.mat, gap penalties of −12/−4 with a global alignment score of 488; Myers and Miller, 1989, CABIOS 4:11-7).

[1449] Use of MANGO 003 Nucleic Acids Polypeptides and Modulators Thereof

[1450] MANGO 003 includes three immunoglobulin-like domains. Proteins having such domains play a role in mediating protein-protein and protein-ligand interactions, and thus can influence a wide variety of biological processes, including cell surface recognition; transduction of an extracellular signal (e.g., by interacting with a ligand and/or a cell-surface receptor); and/or modulation of signal transduction pathways.

[1451] MANGO 003 further includes a neurotransmitter-gated ion channel domain. Proteins having such domains play a role in modulating signal transmission at chemical synapses by, for example, influencing processes, such as the release of neurotransmitters from a cell (e.g., a neuronal cell); modulating membrane excitability and/or resting potential; and/or modulating ion flux across a membrane of a cell (e.g., a neuronal or a muscle cell). Because MANGO 003 includes a neurotransmitter-gated ion channel domain, MANGO 003 polypeptides, nucleic acids, and modulators thereof can be used to treat neural disorders (e.g., a CNS disorder, including Alzheimer's disease, Pick's disease, Parkinson's and other Lewy diffuse body diseases, multiple sclerosis, amyotrophic lateral sclerosis, progressive supranuclear palsy, epilepsy, and Jakob-Creutzfieldt disease; psychiatric disorders, e.g., depression, schizophrenic disorders, Korsakoff s psychosis, mania, anxiety disorders, or phobic disorders; learning or memory disorders, e.g., amnesia or age-related memory loss; and neurological disorders, e.g., migraine).

[1452] MANGO 003 polypeptides, nucleic acids, and modulators thereof can be used to modulate function, survival, morphology, migration, proliferation and/or differentiation of cells in the tissues in which it is expressed (e.g. thyroid, liver, skeletal muscle, kidney, heart, lung, testis and brain). For example, MANGO 003 polypeptides, nucleic acids, and modulators thereof can be used to modulate endocrine, hepatic, skeletal muscular, renal, cardiac, reproductive and/or brain function. Accordingly, these molecules can be used to treat a variety of disease including, but not limited to, endocrine disorders (e.g., hypothyroidism, hyperthyroidism, dwarfism, giantism, acromegaly); hepatic disorders (e.g., hepatitis, liver cirrhosis, hepatoma, liver cysts, and hepatic vein thrombosis); skeletal muscular disorders; renal disorders (e.g., renal cell carcinoma, nephritis, polycystic kidney disease); cardiovascular disorders (e.g., atherosclerosis, ischemia reperfusion injury, cardiac hypertrophy, hypertension, coronary artery disease, myocardial infarction, arrhythmia, cardiomyopathies, and congestive heart failure); and/or reproductive disorders (e.g., sterility).

[1453] MANGO 003 polypeptides, nucleic acids, or modulators thereof, can be used to treat hepatic (liver) disorders, such as jaundice, hepatic failure, hereditary hyperbilirunemias (e.g., Gilbert's syndrome, Crigler-Naijar syndromes and Dubin-Johnson and Rotor's syndromes), hepatic circulatory disorders (e.g., hepatic vein thrombosis and portal vein obstruction and thrombosis) hepatitis (e.g., chronic active hepatitis, acute viral hepatitis, and toxic and drug-induced hepatitis) cirrhosis (e.g., alcoholic cirrhosis, biliary cirrhosis, and hemochromatosis), or malignant tumors (e.g., primary carcinoma, hepatoblastoma, and angiosarcoma).

[1454] In another example, MANGO 003 polypeptides, nucleic acids, or modulators thereof, can be used to treat disorders of skeletal muscle, such as muscular dystrophy (e.g., Duchenne Muscular Dystrophy, Becker Muscular Dystrophy, Emery-Dreifuss Muscular Dystrophy, Limb-Girdle Muscular Dystrophy, Facioscapulohumeral Muscular Dystrophy, Myotonic Dystrophy, Oculopharyngeal Muscular Dystrophy, Distal Muscular Dystrophy, and Congenital Muscular Dystrophy), motor neuron diseases (e.g., Amyotrophic Lateral Sclerosis, Infantile Progressive Spinal Muscular Atrophy, Intermediate Spinal Muscular Atrophy, Spinal Bulbar Muscular Atrophy, and Adult Spinal Muscular Atrophy), myopathies (e.g., inflammatory myopathies (e.g., Dermatomyositis and Polymyositis), Myotonia Congenita, Paramyotonia Congenita, Central Core Disease, Nemaline Myopathy, Myotubular Myopathy, and Periodic Paralysis), and metabolic diseases of muscle (e.g., Phosphorylase Deficiency, Acid Maltase Deficiency, Phosphofructokinase Deficiency, Debrancher Enzyme Deficiency, Mitochondrial Myopathy, Carnitine Deficiency, Carnitine Palmityl Transferase Deficiency, Phosphoglycerate Kinase Deficiency, Phosphoglycerate Mutase Deficiency, Lactate Dehydrogenase Deficiency, and Myoadenylate Deaminase Deficiency).

[1455] In another example, MANGO 003 polypeptides, nucleic acids, or modulators thereof, can be used to treat renal disorders, such as glomerular diseases (e.g., acute and chronic glomerulonephritis, rapidly progressive glomerulonephritis, nephrotic syndrome, focal proliferative glomerulonephritis, glomerular lesions associated with systemic disease, such as systemic lupus erythematosus, Goodpasture's syndrome, multiple myeloma, diabetes, neoplasia, sickle cell disease, and chronic inflammatory diseases), tubular diseases (e.g., acute tubular necrosis and acute renal failure, polycystic renal diseasemedullary sponge kidney, medullary cystic disease, nephrogenic diabetes, and renal tubular acidosis), tubulointerstitial diseases (e.g., pyelonephritis, drug and toxin induced tubulointerstitial nephritis, hypercalcemic nephropathy, and hypokalemic nephropathy) acute and rapidly progressive renal failure, chronic renal failure, nephrolithiasis, vascular diseases (e.g., hypertension and nephrosclerosis, microangiopathic hemolytic anemia, atheroembolic renal disease, diffuse cortical necrosis, and renal infarcts), or tumors (e.g. renal cell carcinoma and nephroblastoma).

[1456] Further, in light of MANGO 003's pattern of expression in mice, MANGO 003 expression can be utilized as a marker for specific tissues (e.g., liver, skeletal muscle, kidney) and/or cells (e.g., hepatic, skeletal muscle, renal) in which MANGO 003 is expressed. MANGO 003 nucleic acids can also be utilized for chromosomal mapping.

[1457] Mango 347

[1458] A cDNA encoding human MANGO 347 was identified by analyzing the sequences of clones present in a human brain cDNA library.

[1459] This analysis led to the identification of a clone, j1hbad295g12, encoding full-length human MANGO 347. The cDNA of this clone is 1423 nucleotides long (FIGS. 166A-166B; SEQ ID NO: 111). The 414 nucleotide open reading frame of this cDNA (nucleotides 31 to 444 of SEQ ID NO: 111) encodes a 138 amino acid protein (SEQ ID NO: 112).

[1460] The signal peptide prediction program SIGNALP (Nielsen et al., 1997, Protein Engineering 10:1-6) predicted that human MANGO 347 includes a 35 amino acid signal peptide at amino acid 1 to about amino acid 35 preceding the mature human MANGO 347 protein which corresponds to about amino acid 36 to amino acid 138 of SEQ ID NO: 112.

[1461] Human MANGO 347 that has not been post-translationally modified is predicted to have a molecular weight of 15.4 kDa prior to cleavage of its signal peptide and a molecular weight of 11.3 kDa subsequent to cleavage of its signal peptide.

[1462] MANGO 347 family members can include a CUB domain sequence. As used herein, the term “CUB domain” includes an amino acid sequence having at least about 80-150, preferably 90-130, more preferably 96-120, and most preferably about 110 amino acids in length. Preferably, a CUB domain further includes at least one, preferably two, three, and most preferably four conserved cysteine residues. Preferably, the conserved cysteine residues form at least one, and preferably two disulfide bridges (e.g., Cys1-Cys2, and Cys3-Cys4) resulting in a β-barrel configuration. The CUB domain of MANGO 347 extends from about amino acid 40 to amino acid 136 of SEQ ID NO: 112. FIG. 168 depicts an alignment of the consensus hidden Markov model CUB domain with this domain in human MANGO 347 at amino acids 40 to 136 of SEQ ID NO: 112.

[1463] In one embodiment, a MANGO 354 family member includes at least one immunoglobulin domain and a transmembrane domain. In another embodiment, a MANGO 354 family member includes at least one immunoglobulin domain, a transmembrane domain and a signal peptide.

[1464] Human MANGO 347 includes a CUB domain at amino acids 40-136 of SEQ ID NO: 112. An alignment of the CUB domain of human MANGO 347 with a consensus hidden Markov model CUB domain amino acid sequence derived from a hidden Markov model is shown in FIG. 168.

[1465] Casein kinase II phosphorylation sites are present at amino acids 67-70, and 108-111. N-myristylation sites are present at amino acids 19-24, 31-36, 64-69, and 113-118.

[1466] Clone jlhbad295g12, which encodes human MANGO 347, was deposited as a composite deposit having a designation EpM347 with the American Type Culture Collection (ATCC® 10801 University Boulevard, Manassas Va. 20110-2209) on Jun. 18, 1999 and assigned Accession Number PTA-250. A description of the deposit conditions used in, set forth below. This deposit will be maintained under the terms of the Budapest Treaty on the International Recognition of the Deposit of Microorganisms for the Purposes of Patent Procedure. This deposit was made merely as a convenience for those of skill in the art and is not an admission that a deposit is required under 35 U.S.C. §112.

[1467] FIG. 167 depicts a hydropathy plot of human MANGO 347. The hydropathy plot indicates that human MANGO 347 has a signal peptide at its amino terminus, suggesting that human MANGO 347 is a secreted protein.

[1468] Use of MANGO 347 Nucleic Acids Polypeptides, and Modulators Thereof

[1469] MANGO 347 includes a CUB domain. Proteins having such a domain play a role in mediating cell interactions during development, and thus can influence a wide variety of developmental processes, including morphogenesis, cellular migration, adhesion, proliferation, differentiation, and/or survival. MANGO 347 polypeptides are expressed in neural (e.g., brain cells). Because MANGO 347 includes a CUB domain and is expressed in neural cells, MANGO 347 polypeptides, nucleic acids, and modulators thereof can be used to treat disorders involving, e.g., cellular migration, proliferation, and differentiation of a cell, e.g., a neural cell (e.g., a CNS disorder, including Alzheimer's disease, Pick's disease, Parkinson's and other Lewy diffuse body diseases, multiple sclerosis, amyotrophic lateral sclerosis, progressive supranuclear palsy, epilepsy, and Jakob-Creutzfieldt disease; psychiatric disorders, e.g., depression, schizophrenic disorders, Korsakoff s psychosis, mania, anxiety disorders, or phobic disorders; learning or memory disorders, e.g., amnesia or age-related memory loss; and neurological disorders, e.g., migraine).

[1470] Further, in light of MANGO 347's presence in a human brain cDNA library, MANGO 347 expression can be utilized as a marker for specific tissues (e.g., brain) and/or cells (e.g., brain) in which MANGO 347 is expressed. MANGO 347 nucleic acids can also be utilized for chromosomal mapping.

[1471] Tango 272

[1472] A cDNA encoding human TANGO 272 was identified by analyzing the sequences of clones present in a human microvascular endothelial cell library (HMvEC) cDNA library.

[1473] This analysis led to the identification of a clone, jthda089h03, encoding full-length human TANGO 272. The cDNA of this clone is 5036 nucleotides long (FIGS. 169A-169F; SEQ ID NO: 113). The 3149 nucleotide open reading frame of this cDNA 25 (nucleotides 230-3379 of SEQ ID NO: 113) encodes a 1050 amino acid protein (SEQ ID NO: 114).

[1474] Northern blot analysis using the human clone jthda089h03 revealed strong expression of the human TANGO 272 gene in the heart. Moderate expression was detected in the placenta, lung, and liver, and lower levels of expression were detected in the brain, skeletal muscle, kidney, and pancreas.

[1475] The signal peptide prediction program SIGNALP (Nielsen et al., 1997, Protein Engineering 10:1-6) predicted that human TANGO 272 includes an 20 amino acid signal peptide at amino acid 1 to about amino acid 20 preceding the mature human TANGO 272 protein which corresponds to about amino acid 21 to amino acid 1050 of SEQ ID NO: 114.

[1476] Human TANGO 272 that has not been post-translationally modified is predicted to have a molecular weight of 112 kDa prior to cleavage of its signal peptide and a molecular weight of 110 kDa subsequent to cleavage of its signal peptide.

[1477] Human TANGO 272 is a transmembrane protein having an extracellular domain which extends from about amino acid 21 to about amino acid 767, a transmembrane domain which extends from about amino acid 768 to about amino acid 791, and a cytoplasmic domain which extends from about amino acid 792 to amino acid 1050 of SEQ ID NO: 114.

[1478] Alternatively, in another embodiment, a human TANGO 272 protein contains an extracellular domain which extends from about amino acid 792 to amino acid 1050, a transmembrane domain which extends from about amino acid 768 to about amino acid 791, and a cytoplasmic domain which extends from about amino acid 21 to about amino acid 767 of SEQ ID NO: 114.

[1479] TANGO 272 family members can include at least one, two, three, four, five, six, seven, eight, nine, ten, eleven, twelve, preferably thirteen, and more preferably fourteen EGF-like domains. Preferably, the EGF-like domains are found in the extracellular domain of a TANGO 272 protein. As used herein, an “EGF-like domain” refers to an amino acid sequence of about 25 to 50, preferably about 30 to 45, and more preferably 30 to 40 amino acid residues in length. An EGF domain further contains at least about 2 to 10, preferably, 3 to 9, 4 to 8, or 6 to 7 conserved cysteine residues. A consensus hidden Markov model EGF-like domain sequence includes six cysteines, all of which are thought to be involved in disulfide bonds having the following amino acid sequence: Cys-Xaa(5, 7)-Cys-Xaa(4, 5, 12)-Cys-Xaa(1, 5, 6)-Cys-Xaa(1)-Cys-Xaa(1)-Cys-Xaa(8)-Cys, where Xaa is any amino acid. The region between the fifth and the sixth cysteine typically contains two conserved glycines of which at least one is present in most EGF-like domains.

[1480] In one embodiment, TANGO 272 includes at least one EGF-like domain having the sequences selected from the group consisting of: amino acids 151-181; amino acids 200-229; amino acids 242-272; amino acids 285-315; amino acids 328-358; amino acids 378-404; amino acids 417-447; amino acids 460-490; amino acids 503-533; amino acids 546-576; amino acids 589-619; amino acids 632-661; amino acids 674-704; and amino acids 30 717-747 of SEQ ID NO: 114.

[1481] In another embodiment, TANGO 272 includes at least one EGF-like domain having the sequences selected from the group consisting of: 37-67; amino acids 80-110; amino acids 123-153; and amino acids 166-196.

[1482] In yet another embodiment, TANGO 272 includes at least one EGF-like domain having the sequences selected from the group consisting of: amino acids 18-48; amino acids 61-91; amino acids 105-137; amino acids 150-180; amino acids 193-223; amino acids 236-266; amino acids 279-309; amino acids 322-352; amino acids 365-394; amino acids 407-437; and amino acids 450-480.

[1483] An alignment of the consensus hidden Markov model EGF-like domains with the EGF-like domains of human TANGO 272 is shown in FIGS. 171A-171D. The more conserved residues in the consensus sequence are indicated by uppercase letters and the less conserved residues in the consensus sequence are indicated by lowercase letters. By alignment of the amino acid sequence of the consensus hidden Markov model EGF-like domain with the amino acid sequence of the EGF-like domains of TANGO 272, conserved cysteine residues can be found. For example, conserved cysteine residues can be found at amino acid 151, 159, 164, 167, 200, 206, 211, 218, 220, 229, 242, 249, 263, 264, 272, 285, 291, 297, 304, 306, 315, 328, 334, 340, 347, 349, 358, 378, 386, 393, 395, 404, 417, 423, 429, 436, 438, 447, 460, 466, 472, 479, 481, 490, 503, 509, 515, 522, 524, 533, 546, 552, 558, 565, 567, 576, 589, 595, 601, 608, 610, 619, 632, 637, 643, 650, 652, 661, 674, 680, 686, 693, 695, 717,723, 729, 736,738 and 747 of SEQ ID NO: 114.

[1484] TANGO 272 family members can include at least one delta serrate ligand domain. As used herein, a “delta serrate ligand domain” (also referred to herein as a “DSL domain”) refers to an amino acid sequence of about 30-70, more preferably 45-60, and most preferably 58 amino acids in length typically found in transmembrane signaling molecules that regulate differentiation in metazoans (Lissemore et al., 1999, Mol. Phylogenet. Evol. 11 (2):308-19). In one embodiment, human TANGO 272 includes a delta serrate ligand domain from about amino acids 518 to 576; and about amino acids 246 to 309 of SEQ ID NO: 114. FIG. 171C depicts an alignment of the consensus hidden Markov model delta serrate ligand domain with this domain in human TANGO 272 at amino acids 518 to 576 of SEQ ID NO: 114. FIGS. 195A-195B depicts an alignment of the consensus hidden Markov model 25 delta serrate ligand domain with this domain in mouse TANGO 272 at amino acids 10 to 67 of SEQ ID NO: 114. FIG. 197C depicts an alignment of the consensus hidden Markov model delta serrate ligand domain with this domain in rat TANGO 272 at amino acids 246 to 309 of SEQ ID NO: 114.

[1485] TANGO 272 family members can include at least one RGD cell attachment site. As used herein, the term “RGD cell attachment site” refers to a cell adhesion sequence consisting of amino acids Arg-Gly-Asp typically found in extracellular matrix proteins such as collagens, laminin and fibronectin, among others (reviewed in Ruoslahti, 1996, Annu. Rev. Cell Dev. Biol. 12:697-715). Preferably, the RGD cell attachment site is located in the extracellular domain of a TANGO 272 protein and interacts (e.g., binds to) a cell surface receptor, such as an integrin receptor. As used herein, the term “integrin” refers to a family of receptors comprising α/β heterodimers that mediate cell attachment to extracellular matrices and cell-cell adhesion events. The α subunits vary in size between 120 and 180 kDa and are each noncovalently associated with a β subunit (90-110 kDa) (reviewed by Hynes, 1992, Cell 69:11-25). Most integrins are expressed in a wide variety of cells, and most cells express several integrins. There are at least 8 known a subunits and 14 known β subunits. The majority of the integrin ligands are extracellular matrix proteins involved in substratum cell adhesion such as collagens, laminin, fibronectin among others. The RGD cell attachment site is located at about amino acid residues 177-179.

[1486] In one embodiment, a TANGO 272 family member includes fourteen EGF-like domains and a delta serrate ligand domain. In another embodiment, a TANGO 272 family member includes fourteen EGF-like domains, a delta serrate ligand domain and an RGD cell attachment site. In yet another embodiment, a TANGO 272 family member includes fourteen EGF-like domains, a delta serrate ligand domain, an RGD cell attachment site, and a transmembrane domain. In another embodiment, a TANGO 272 family member includes fourteen EGF-like domains, a delta serrate ligand domain, an RGD cell attachment site, a transmembrane domain, and an extracellular N-terminal domain. In another embodiment, a TANGO 272 family member includes fourteen EGF-like domains, a delta serrate ligand domain, an RGD cell attachment site, a transmembrane domain, an extracellular N-terminal domain and a C-terminal cytoplasmic domain. In another embodiment, a TANGO 272 family member includes fourteen EGF-like domains, a delta serrate ligand domain, an RGD cell attachment site, a transmembrane domain, an extracellular N-terminal domain, a C-terminal cytoplasmic domain, and a signal peptide.

[1487] Human TANGO 272 includes fourteen EGF-like domains at amino acids 151-181; amino acids 200-229; amino acids 242-272; amino acids 285-315; amino acids 328-358; amino acids 378-404; amino acids 417-447; amino acids 460-490; amino acids 503-533; amino acids 546-576; amino acids 589-619; amino acids 632-661; amino acids 674-704; and amino acids 717-747 of SEQ ID NO: 114. FIGS. 171A-171D depicts alignments of each of the EGF-like domains of TANGO 272 with consensus hidden Markov model EGF-like domains. Human TANGO 272 further includes a delta serrate ligand domain from amino acids 518 to 576. An alignment of the delta serrate ligand domain of human TANGO 272 with a consensus hidden Markov model of this domain is depicted (FIG. 171C).

[1488] An RGD cell attachment site is present at amino acids 177-179. N-glycosylation sites are present at amino acids 284-287, 405-408, 459-462, 489-492, 504-507, 588-591, 639-642, 647-650, 716-719, and 873-876. An amidation site is present at amino acids 628-631. Protein kinase C phosphorylation sites are present at amino acids 38-40, 70-72, 107-109, 359-361, 461-463, 594-596, 809-811, 896-898, 940-942, 977-979, and 1022-1024. Casein kinase II phosphorylation sites are present at amino acids 30-33, 38-41, 473-476, 548-551, 579-582, 657-660, 897-900, 921-924, 940-943, and 955-958. A tyrosine kinase phosphorylation site is present at amino acids 361-368. N-myristylation sites are present at amino acids 14-19, 103-108, 269-274, 302-307, 325-330, 345-350, 401-406, 427-432, 434-439, 457-462, 520-525, 586-591, 606-611, 648-653, 707-712, 714-719, 769-774, 866-871, 926-931, and 1014-1019.

[1489] Clone jthda089h03, which encodes human TANGO 272, was deposited as a composite deposit having a designation EpT272 with the American Type Culture Collection (ATTCC® 10801 University Boulevard, Manassas Va. 20110-2236) Jun. 18, 1999 and assigned Accession Number PTA-250. A description of the deposit conditions used is set forth in the section entitled “Deposit of Clones” below. This deposit will be maintained under the terms of the Budapest Treaty on the International Recognition of the Deposit of Microorganisms for the Purposes of Patent Procedure. This deposit was made merely as a convenience for those of skill in the art and is not an admission that a deposit is required under 35 U.S.C. §112.

[1490] FIG. 170 depicts a hydropathy plot of human TANGO 272. The hydropathy plot indicates the presence of a hydrophobic domain within human TANGO 272, suggesting that human TANGO 272 is a transmembrane protein.

[1491] A cDNA encoding mouse TANGO 272 was identified by analyzing the sequences of clones present in a mouse testis cDNA library.

[1492] This analysis led to the identification of a clone, jtmzb062c04, encoding partial mouse TANGO 272. The cDNA of this clone is 2569 nucleotides long (FIGS. 172A-172C; SEQ ID NO: 115). The 1492 nucleotide open reading frame of this cDNA (nucleotides 1-1492 of SEQ ID NO: 115) encodes a 497 amino acid protein (SEQ ID NO: 116).

[1493] Mouse TANGO 272 that has not been post-translationally modified is predicted to have a molecular weight of 53.5 kDa.

[1494] Mouse TANGO 272 is a transmembrane protein having an extracellular domain which extends from about amino acid 1 to about amino acid 216, a transmembrane domain which extends from about amino acid 217 to about amino acid 240, and a cytoplasmic domain which extends from about amino acid 241 to amino acid 497 of SEQ ID NO: 116.

[1495] Alternatively, in another embodiment, a mouse TANGO 272 protein contains an extracellular domain which extends from about amino acid 241 to amino acid 497, a transmembrane domain which extends from about amino acid 217 to about amino acid 240, and a cytoplasmic domain which extends from about amino acid 1 to about amino acid 216 of SEQ ID NO: 116.

[1496] Mouse TANGO 272 includes four EGF-like domains at about amino acids 37-67; amino acids 80-110; amino acids 123-153; and amino acids 166-196. Mouse TANGO 272 further includes four laminin-EGF-like domains at about amino acids 3-37; amino acids 41-80; amino acids 83-123; and amino acids 127-172 of SEQ ID NO: 116. FIGS. 195A-195B depicts alignments of each of the EGF-like- and laminin-EGF-like domains of TANGO 272 with consensus hidden Markov model EGF-like domains.

[1497] Mouse TANGO 272 further includes a delta serrate ligand domain from amino acids 10 to 67 of SEQ ID NO: 116. An alignment of the delta serrate ligand domain of mouse TANGO 272 with a consensus hidden Markov model of this domain is also depicted in FIG. 195A.

[1498] Based on the Prosite analysis, EGF-like domain cysteine pattern signature are present at amino acids 13-24, 56-67, 99-110, 142-153, and 185-196.

[1499] N-glycosylation sites are present at amino acids 36-39, 88-91, 165-168, and 323-326. An amidation site is present at amino acids 76-79. Protein kinase C phosphorylation sites are present at amino acids 42-44, 258-260, 354-356, 388-390, 469-471, and 492-494. Casein kinase II phosphorylation sites are present at amino acids 106-109, 192-195, 343-346, 388-391, and 446-449. N-myristylation sites are present at amino acids 11-16, 34-39, 47-52, 54-59, 97-102, 120-125, 140-145, 163-168, 199-204, 218-223, 372-377, and 461-466.

[1500] FIG. 173 depicts a hydropathy plot of Mouse TANGO 272. The hydropathy plot indicates the presence of a hydrophobic domain within Mouse TANGO 272, suggesting that mouse TANGO 272 is a transmembrane protein.

[1501] A cDNA encoding rat TANGO 272 was identified by analyzing the sequences of clones present in a rat neonatal sciatic nerve cDNA library.

[1502] This analysis led to the identification of a clone, atrxa6b6, encoding partial rat TANGO 272. The cDNA of this clone is 3567 nucleotides long (FIGS. 189A-189D; SEQ ID NO: 123). The 1908 nucleotide open reading frame of this cDNA (nucleotides 925-2832 of SEQ ID NO: 123) encodes a 636 amino acid protein (SEQ ID NO: 124).

[1503] Rat TANGO 272 that has not been post-translationally modified is predicted to have a molecular weight of 67.4 kDa.

[1504] Rat TANGO 272 is a transmembrane protein having an extracellular domain which extends from about amino acid 1 to about amino acid 500, a transmembrane domain which extends from about amino acid 501 to about amino acid 524, and a cytoplasmic domain which extends from about amino acid 525 to amino acid 636 of SEQ ID NO: 124.

[1505] Alternatively, in another embodiment, a rat TANGO 272 protein contains an extracellular domain which extends from about amino acid 525 to amino acid 636, a transmembrane domain which extends from about amino acid 501 to about amino acid 524, and a cytoplasmic domain which extends from about amino acid 1 to about amino acid 500 of SEQ ID NO: 124.

[1506] Rat TANGO 272 includes eleven EGF-like domains at about amino acids 18-48; amino acids 61-91; amino acids 105-137; amino acids 150-180; amino acids 193-223; amino acids 236-266; amino acids 279-309; amino acids 322-352; amino acids 365-394; amino acids 407-437; and amino acids 450-480. FIGS. 197A-197D depicts alignments of each of the EGF-like-domains of rat TANGO 272 with consensus hidden Markov model EGF-like domains.

[1507] Rat TANGO 272 further includes eleven laminin/EGF-like domains at about amino acids 22-61; amino acids 65-105; amino acids 109-150; amino acids 154-193; amino acids 197-236; amino acids 240-279; amino acids 283-322; amino acids 326-365; amino acids 368-407; amino acids 411-450; and amino acids 454-489 of SEQ ID NO: 124. FIG. 197A-197D depicts alignments of each of the laminin/EGF-like-domains of rat TANGO 272 with consensus hidden Markov model EGF-like domains.

[1508] Rat TANGO 272 further includes a delta serrate ligand domain from amino acids 246 to 309 of SEQ ID NO: 124. An alignment of the delta serrate ligand domain of rat TANGO 272 with a consensus hidden Markov model of this domain is also depicted in FIG. 197C.

[1509] Based on the Prosite analysis, EGF-like domain cysteine pattern signature are present at amino acids 37-48, 80-91, 126-137, 169-180, 255-266, 298-309, 341-352, 383-394, 426-437, and 469-480.

[1510] N-glycosylation sites are present at amino acids 17-20, 138-141, 192-195, 222-225, 237-240, 321-324, 372-375,436-439, and 449-452. A cAMP/cGMP-dependent protein kinase phosphorylation site is present at amino acids 618-621. An amidation site is present at amino acids 361-364. Protein kinase C phosphorylation sites are present at amino acids 92-94, 327-329, 542-544, and 596-598. Casein kinase II phosphorylation sites are present at amino acids 104-107, 206-209, 281-284, and 390-393. A tyrosine kinase phosphorylation site is present at amino acids 94-101. N-myristylation sites are present at amino acids 2-7, 35-40, 58-63, 78-83, 134-139, 160-165, 167-172, 190-195, 210-215, 253-258, 319-324,339-344, 381-386, 404-409, 424-429, 447-452, 483-488, and 502-507.

[1511] FIG. 196 depicts a hydropathy plot of rat TANGO 272. The hydropathy plot indicates the presence of a hydrophobic domain within rat TANGO 272, suggesting that rat TANGO 272 is a transmembrane protein.

[1512] A global alignment between the nucleotide sequence of the open reading frame (ORF) of human TANGO 272 and the nucleotide sequence of the open reading frame of mouse TANGO 272 revealed a 39.1% identity (FIGS. 186A-186E). The global alignment was performed using the ALIGN program version 2.0 u (Matrix file used: pam 120.mat, gap penalties of −12/−4 with a global alignment score of −79; Myers and Miller, 1989, CABIOS 4:11-7).

[1513] A local alignment between the nucleotide sequence of human TANGO 272 and the nucleotide sequence of mouse TANGO 272 revealed 67.6% identity over nucleotides 1890-4610 of the human TANGO 272 sequence (nucleotides 10-2560 of mouse TANGO 272) (FIGS. 187A-187C). The local alignment was performed using the L-ALIGN program version 2.0 u54 July 1996 (Matrix file used: pam 120.mat, gap penalties of −12/−4 with a score of 8462; Huang and Miller, 1991, Adv. Appl. Math. 12:373-81).

[1514] A global alignment between the amino acid sequence of human TANGO 272 and the amino acid sequence of mouse TANGO 272 revealed a 38.2% identity (FIGS. 188A-188B). The global alignment was performed using the ALIGN program version 2.0 u (Matrix file used: pam 120.mat, gap penalties of −12/−4 with a global alignment score of −19; Myers and Miller, 1989, CABIOS 4:11-7).

[1515] A global alignment between the nucleotide sequence of human TANGO 272 and the nucleotide sequence of rat TANGO 272 revealed a 55.7% identity (FIGS. 190A-190H). The global alignment was performed using the ALIGN program version 2.0 u (Matrix file used: pam 120.mat, gap penalties of −12/−4 with a global alignment score of 8635; Myers and Miller, 1989, CABIOS 4:11-7).

[1516] A global alignment between the nucleotide sequence of mouse TANGO 272 and the nucleotide sequence of rat TANGO 272 revealed a 43.7% identity (FIGS. 191A-191F). The global alignment was performed using the ALIGN program version 2.0 u (Matrix file used: pam 120.mat, gap penalties of −12/−4 with a global alignment score of 2827; Myers and Miller, 1989, CABIOS 4:11-7).

[1517] Use of TANGO 272 Nucleic Acids Polypeptides and Modulators Thereof

[1518] TANGO 272 includes fourteen EGF-like domains. Proteins having such domains play a role in mediating protein-protein interactions, and thus can influence a wide variety of biological processes, including cell surface recognition; modulation of cell-cell contact; modulation of cell fate determination; and modulation of wound healing and tissue repair.

[1519] TANGO 272 further includes an RGD cell attachment site. Proteins having such domains are typically extracellular matrix proteins such as collagens, laminin and fibronectin, among others (reviewed in Ruoslahti, 1996, Annu. Rev. Cell Dev. Biol. 12:697-715). An RGD cell attachment site typically interacts (e.g., binds to) a cell surface receptor, such as an integrin receptor, and thus mediates a variety of biological processes, including cellular adhesion, migration, among others.

[1520] Because TANGO 272 includes EGF-like domains and an RGD cell attachment site, TANGO 272 polypeptides, nucleic acids, and modulators thereof can be used to treat disorders involving, e.g., cellular migration, proliferation, and differentiation of a cell. For example, TANGO 272 polypeptides, nucleic acids, and modulators thereof can be used to treat neoplastic disorders, e.g., cancer, tumor metastasis.

[1521] TANGO 272 polypeptides, nucleic acids, and modulators thereof can be used to modulate function, survival, morphology, migration, proliferation, tissue repair and/or differentiation of cells in the tissues in which it is expressed (e.g., microvascular endothelial cells). For example, TANGO 272 polypeptides, nucleic acids, and modulators thereof can be used to modulate cardiovascular function, and/or to promote wound healing and tissue repair (e.g., of the skin, cornea and mucosal lining). Accordingly, these molecules can be used to treat a variety of cardiovascular diseases including, but not limited to, atherosclerosis, ischemia reperfusion injury, cardiac hypertrophy, hypertension, coronary artery disease, myocardial infarction, arrhythmia, cardiomyopathies, and congestive heart failure.

[1522] As TANGO 272 exhibits expression in the heart, TANGO 272 nucleic acids, proteins, and modulators thereof can be used to treat heart disorders as described herein.

[1523] In another example, TANGO 272 polypeptides, nucleic acids, or modulators thereof, can be used to treat placental disorders, such as toxemia of pregnancy (e.g., preeclampsia and eclampsia), placentitis, or spontaneous abortion.

[1524] In another example, TANGO 272 polypeptides, nucleic acids, or modulators thereof, can be used to treat pulmonary (lung) disorders, such as atelectasis, cystic fibrosis, rheumatoid lung disease, pulmonary congestion or edema, chronic obstructive airway disease (e.g., emphysema, chronic bronchitis, bronchial asthma, and bronchiectasis), diffuse interstitial diseases (e.g., sarcoidosis, pneumoconiosis, hypersensitivity pneumonitis, Goodpasture's syndrome, idiopathic pulmonary hemosiderosis, pulmonary alveolar proteinosis, desquamative interstitial pneumonitis, chronic interstitial pneumonia, fibrosing alveolitis, hamman-rich syndrome, pulmonary eosinophilia, diffuse interstitial fibrosis, Wegener's granulomatosis, lymphomatoid granulomatosis, and lipid pneumonia), or tumors (e.g., bronchogenic carcinoma, bronchiolovlveolar carcinoma, bronchial carcinoid, hamartoma, and mesenchymal tumors).

[1525] In another example, TANGO 272 polypeptides, nucleic acids, or modulators thereof, can be used to treat hepatic (liver) disorders, such as jaundice, hepatic failure, hereditary hyperbiliruinemias (e.g., Gilbert's syndrome, Crigler-Naijar syndromes and Dubin-Johnson and Rotor's syndromes), hepatic circulatory disorders (e.g., hepatic vein thrombosis and portal vein obstruction and thrombosis) hepatitis (e.g., chronic active hepatitis, acute viral hepatitis, and toxic and drug-induced hepatitis) cirrhosis (e.g., alcoholic cirrhosis, biliary cirrhosis, and hemochromatosis), or malignant tumors (e.g., primary carcinoma, hepatoblastoma, and angiosarcoma).

[1526] In another example, TANGO 272 polypeptides, nucleic acids, or modulators thereof, can be used to treat disorders of the brain, such as cerebral edema, hydrocephalus, brain herniations, iatrogenic disease (due to, e.g., infection, toxins, or drugs), inflammations (e.g., bacterial and viral meningitis, encephalitis, and cerebral toxoplasmosis), cerebrovascular diseases (e.g., hypoxia, ischemia, and infarction, intracranial hemorrhage and vascular malformations, and hypertensive encephalopathy), and tumors (e.g., neuroglial tumors, neuronal tumors, tumors of pineal cells, meningeal tumors, primary and secondary lymphomas, intracranial tumors, and medulloblastoma), and to treat injury or trauma to the brain.

[1527] In another example, TANGO 272 polypeptides, nucleic acids, or modulators thereof, can be used to treat disorders of skeletal muscle, such as muscular dystrophy (e.g., Duchenne Muscular Dystrophy, Becker Muscular Dystrophy, Emery-Dreifuss Muscular Dystrophy, Limb-Girdle Muscular Dystrophy, Facioscapulohumeral Muscular Dystrophy, Myotonic Dystrophy, Oculopharyngeal Muscular Dystrophy, Distal Muscular Dystrophy, and Congenital Muscular Dystrophy), motor neuron diseases (e.g., Amyotrophic Lateral Sclerosis, Infantile Progressive Spinal Muscular Atrophy, Intermediate Spinal Muscular Atrophy, Spinal Bulbar Muscular Atrophy, and Adult Spinal Muscular Atrophy), myopathies (e.g., inflammatory myopathies (e.g., Dermatomyositis and Polymyositis), Myotonia Congenita, Paramyotonia Congenita, Central Core Disease, Nemaline Myopathy, Myotubular Myopathy, and Periodic Paralysis), and metabolic diseases of muscle (e.g., Phosphorylase Deficiency, Acid Maltase Deficiency, Phosphofructokinase Deficiency, Debrancher Enzyme Deficiency, Mitochondrial Myopathy, Camitine Deficiency, Carnitine Palmityl Transferase Deficiency, Phosphoglycerate Kinase Deficiency, Phosphoglycerate Mutase Deficiency, Lactate Dehydrogenase Deficiency, and Myoadenylate Deaminase Deficiency).

[1528] In another example, TANGO 272 polypeptides, nucleic acids, or modulators thereof, can be used to treat renal disorders, such as glomerular diseases (e.g., acute and chronic glomerulonephritis, rapidly progressive glomerulonephritis, nephrotic syndrome, focal proliferative glomerulonephritis, glomerular lesions associated with systemic disease, such as systemic lupus erythematosus, Goodpasture's syndrome, multiple myeloma, diabetes, neoplasia, sickle cell disease, and chronic inflammatory diseases), tubular diseases (e.g., acute tubular necrosis and acute renal failure, polycystic renal diseasemedullary sponge kidney, medullary cystic disease, nephrogenic diabetes, and renal tubular acidosis), tubulointerstitial diseases (e.g., pyelonephritis, drug and toxin induced tubulointerstitial nephritis, hypercalcemic nephropathy, and hypokalemic nephropathy) acute and rapidly progressive renal failure, chronic renal failure, nephrolithiasis, vascular diseases (e.g., hypertension and nephrosclerosis, microangiopathic hemolytic anemia, atheroembolic renal disease, diffuse cortical necrosis, and renal infarcts), or tumors (e.g., renal cell carcinoma and nephroblastoma).

[1529] In another example, TANGO 272 polypeptides, nucleic acids, or modulators thereof, can be used to treat pancreatic disorders, such as pancreatitis (e.g., acute hemorrhagic pancreatitis and chronic pancreatitis), pancreatic cysts (e.g., congenital cysts, pseudocysts, and benign or malignant neoplastic cysts), pancreatic tumors (e.g., pancreatic carcinoma and adenoma), diabetes mellitus (e.g., insulin- and non-insulin-dependent types, impaired glucose tolerance, and gestational diabetes), or islet cell tumors (e.g., insulinomas, adenomas, Zollinger-Ellison syndrome, glucagonomas, and somatostatinoma).

[1530] Further, in light of TANGO 272's pattern of expression in humans, TANGO 272 expression can be utilized as a marker for specific tissues (e.g., cardiovascular) and/or cells (e.g., cardiac) in which TANGO 272 is expressed. TANGO 272 nucleic acids can also be utilized for chromosomal mapping.

[1531] Tango 295

[1532] A cDNA encoding human TANGO 295 was identified by analyzing the sequences of clones present in a human mammary epithelium cDNA library.

[1533] This analysis led to the identification of a clone, jthvb023d09, encoding full-length human TANGO 295. The cDNA of this clone is 1497 nucleotides long (FIGS. 174A-174B; SEQ ID NO: 117). The 468 nucleotide open reading frame of this cDNA (nucleotides 217-684 of SEQ ID NO: 117) encodes a 156 amino acid protein (SEQ ID NO: 118).

[1534] The signal peptide prediction program SIGNALP (Nielsen et al., 1997, Protein Engineering 10:1-6) predicted that human TANGO 295 includes a 28 amino acid signal peptide at amino acid 1 to about amino acid 28 preceding the mature human TANGO 295 protein which corresponds to about amino acid 29 to amino acid 156.

[1535] Human TANGO 295 that has not been post-translationally modified is predicted to have a molecular weight of 17.5 kDa prior to cleavage of its signal peptide and a molecular weight of 14.6 kDa subsequent to cleavage of its signal peptide.

[1536] Secretion assays reveal that human TANGO 295 protein is secreted as a 17 kDa protein. The secretion assays were performed as follows: 8×10⁵ 293T cells were plated per well in a 6-well plate and the cells were incubated in growth medium (DMEM, 10% fetal bovine serum, penicillin/streptomycin) at 37° C., 5% CO₂ overnight. 293T cells were transfected with 2 μg of full-length MANGO 245 inserted in the pMET7 vector/well and 10 μg LipofectAMINE (GIBCO/BRL Cat. # 18324-012)/well according to the protocol for GIBCO/BRL LipofectAMINE. The transfectant was removed 5 hours later and fresh growth medium was added to allow the cells to recover overnight. The medium was removed and each well was gently washed twice with DMEM without methionine and cysteine (ICN Cat. # 16-424-54). 1 ml DMEM without methionine and cysteine with 50 μCi Trans-³⁵S (ICN Cat. # 51006) was added to each well and the cells were incubated at 37° C., 5% CO₂ for the appropriate time period. A 150 μl aliquot of conditioned medium was obtained and 150 μl of 2×SDS sample buffer was added to the aliquot. The sample was heat-inactivated and loaded on a 4-20% SDS-PAGE gel. The gel was fixed and the presence of secreted protein was detected by autoradiography.

[1537] TANGO 295 family members can include a pancreatic ribonuclease domain sequence. As used herein, the term “pancreatic ribonuclease domain” includes an amino acid sequence having at least about 100 to 150, preferably 110-140, more preferably 120-130, and most preferably 124 amino acids in length. Preferably, a pancreatic ribonuclease domain further includes at least one, preferably two, three, four and most preferably five conserved cysteine residues and an amino acid residue, e.g., a lysine, which is involved in catalytic activity. Preferably, at least one cysteine residue is involved in a disulfide bond, a lysine residue is involved in catalytic activity, and three other residues involved in substrate binding. Proteins having the pancreatic ribonuclease domain are pyrimidine-specific endonucleases present in high quantities in the pancreas of a number of mammalian taxa and of a few reptiles. The pancreatic ribonuclease domain of TANGO 295 extends from about amino acid 32 to amino acid 156 of SEQ ID NO: 118. FIG. 176 depicts an alignment of the consensus hidden Markov model pancreatic ribonuclease domain with this domain in human TANGO 295 at amino acids 32 to 156 of SEQ ID NO: 118.

[1538] Human TANGO 295 includes a pancreatic ribonuclease domain at amino acids 32-156. FIG. 176 depicts an alignment of pancreatic ribonuclease domain of human TANGO 295 with a consensus hidden Markov model pancreatic ribonuclease domain.

[1539] An N-glycosylation site is present at amino acids 127-130. A cAMP/cGMP dependent protein kinase site is present at amino acids 139-142. Protein kinase C phosphorylation sites are present at amino acids 27-29, 62-64, 85-87, and 113-115. N-myristylation sites are present at amino acids 18-23, and 32-37.

[1540] Global alignment of the human TANGO 295 and GenPept AF037081 amino acid sequences revealed 53.2% identity (Matrix file used: pam 120.mat, gap penalties of −12/−4; Myers and Miller, 1989, CABIOS 4:11-7) (FIG. 192). A global alignment of the human TANGO 295 and GenPept AF037081 nucleotide sequences revealed a 22.6% identity between these two sequences (FIGS. 193A-193C) (Matrix file used: pam 120.mat, gap penalties of −12/−4 with a global alignment score of -2718; Myers and Miller, 1989, CABIOS 4:11-7).

[1541] Local alignment of the human TANGO 295 and Genbank AF037081 nucleotide sequences revealed 62.7% identity between nucleotides 235-687 of human TANGO 295, and nucleotides 3-453 of AF037081; 43.4% identity between nucleotides 410-850 of human TANGO 295, and nucleotides 3-450 of AF037081; and 46.5% identity between nucleotides 432-700 of human TANGO 295, and nucleotides 5-251 of AF037081 (Matrix file used: pam 120.mat, gap penalties of −12/−4 with a global alignment score of 1214; Huang and Miller, 1991, Adv. Appl. Math. 12:373-81) (FIGS. 194A-194B).

[1542] Clone jthvb023d09, which encodes human TANGO 295, was deposited as a composite deposit having a designation EpT295 with the American Type Culture Collection (ATCC® 10801 University Boulevard, Manassas Va. 20110-2209) on Jun. 18, 1999 and assigned Accession Number PTA-249. Deposit conditions are described below in the section entitled “Deposit of Clones”. This deposit will be maintained under the terms of the Budapest Treaty on the International Recognition of the Deposit of Microorganisms for the Purposes of Patent Procedure. This deposit was made merely as a convenience for those of skill in the art and is not an admission that a deposit is required under 35 U.S.C. §112.

[1543] FIG. 175 depicts a hydropathy plot of human TANGO 295. The hydropathy plot indicates that human TANGO 295 has a signal peptide at its amino terminus, suggesting that human TANGO 295 is a secreted protein.

[1544] Use of TANGO 295 Nucleic Acids, Polypeptides. and Modulators Thereof

[1545] TANGO 295 includes a pancreatic ribonuclease domain. Proteins having such domains have pyrimidine-specific endonuclease activity, and are present at elevated levels in the pancreas of various mammals and few reptiles. TANGO 295 shows some structural similarities to Ribonuclease k6 (RNase k6). RNase k6 is expressed in human monocytes and monophils (but not in eosinophils), suggesting a role for this ribonuclease in regulating host defense. Based on the structural similarities between TANGO 295 and RNase k6, TANGO 295 may play a role in regulating host defense.

[1546] TANGO 295 polypeptides, nucleic acids, and modulators thereof, can be used to modulate the function, morphology, proliferation and/or differentiation of cells in the tissues in which it is expressed (e.g., mammary epithelium). Accordingly, TANGO 295 polypeptides, nucleic acids, and modulators thereof can be used to treat epithelial disorders, e.g., mammary epithelial disorders (e.g., breast cancer).

[1547] Further, in light of TANGO 295's presence in a human mamary epithelium cDNA library, TANGO 295 expression can be utilized as a marker for specific tissues (e.g., breast) and/or cells (e.g.,mammary) in which TANGO 295 is expressed. TANGO 295 nucleic acids can also be utilized for chromosomal mapping.

[1548] Tango 354

[1549] A cDNA encoding human TANGO 354 was identified by analyzing the sequences of clones present in a Mixed Lymphocyte Reaction (MLR) cDNA library.

[1550] This analysis led to the identification of a clone, jthLa042a04, encoding full-length human TANGO 354. The cDNA of this clone is 1788 nucleotides long (FIGS. 177A-177B; SEQ ID NO: 119). The 915 nucleotide open reading frame of this cDNA (nucleotides 62-976 of SEQ ID NO: 119) encodes a 305 amino acid protein (SEQ ID NO: 120).

[1551] Human TANGO 354 that has not been post-translationally modified is predicted to have a molecular weight of 33.8 kDa prior to cleavage of its signal peptide (31.6 kDa after cleavage of its signal peptide).

[1552] The signal peptide prediction program SIGNALP (Nielsen et al., 1997, Protein Engineering 10:1-6) predicted that human TANGO 354 includes a 19 amino acid signal peptide at amino acid 1 to about amino acid 19 preceding the mature human TANGO 354 protein which corresponds to about amino acid 20 to amino acid 305 of SEQ ID NO: 120.

[1553] Human TANGO 354 is a transmembrane protein having an extracellular domain which extends from about amino acid 20 to about amino acid 169, a transmembrane domain which extends from about amino acid 170 to about amino acid 193, and a cytoplasmic domain which extends from about amino acid 194 to amino acid 305 of SEQ ID NO: 120.

[1554] Alternatively, in another embodiment, a human TANGO 354 protein contains an extracellular domain which extends from about amino acid 194 to amino acid 305, a transmembrane domain which extends from about amino acid 170 to about amino acid 193, and a cytoplasmic domain which extends from about amino acid 20 to about amino acid 169 of SEQ ID NO: 120.

[1555] Human TANGO 354 includes an immunoglobulin domain at amino acids 33-110 of SEQ ID NO: 120. FIG. 179 depicts alignments of the immunoglobulin domains of TANGO 354 with consensus hidden Markov model immunoglobulin domains.

[1556] An N-glycosylation site is present at amino acids 88-91. A cAMP and cGMP-dependent protein kinase phosphorylation site is present at amino acids 233-236. Protein kinase C phosphorylation sites are present at amino acids 81-83, 231-233, and 236-238. Casein kinase II phosphorylation sites are present at amino acids 44-47, 69-72, 81-84, 94-97, 101-104, 113-116, and 146-149. A tyrosine kinase phosphorylation site is present at amino acids 291-299. N-myristylation sites are present at amino acids 30-35, and 109-114.

[1557] Clone jthLa042a04, which encodes human TANGO 354, was deposited as EpT354 with the American Type Culture Collection (ATCC® 10801 University Boulevard, Manassas Va. 20110-2209) on Jun. 18, 1999 and assigned Accession Number PTA-249. This deposit will be maintained under the terms of the Budapest Treaty on the International Recognition of the Deposit of Microorganisms for the Purposes of Patent Procedure. This deposit was made merely as a convenience for those of skill in the art and is not an admission that a deposit is required under 35 U.S.C. §112.

[1558] FIG. 178 depicts a hydropathy plot of human TANGO 354. The hydropathy plot indicates the presence of a hydrophobic domain within human TANGO 354, suggesting that human TANGO 354 is a transmembrane protein.

[1559] Use of TANGO 354 Nucleic Acids, Polypeptides, and Modulators Thereof

[1560] TANGO 354 includes an immunoglobulin-like domain. Proteins having such domains play a role in mediating protein-protein and protein-ligand interactions, and thus can influence a wide variety of biological processes, including modulation of cell surface recognition; modulation of cellular motility, e.g., chemotaxis and chemokinesis; transduction of an extracellular signal (e.g., by interacting with a ligand and/or a cell-surface receptor); and/or modulation of a signal transduction pathways.

[1561] TANGO 354 polypeptides, nucleic acids, and modulators thereof can be used to modulate function, survival, morphology, migration, proliferation and/or differentiation of cells in the tissues in which it is expressed (e.g., hematopoietic tissues). Because of the presence of an immunoglobulin domain and the expression of TANGO 354 in hematopoietic cells, TANGO 354 polypeptides, nucleic acids, and modulators thereof can be used to modulate (e.g., increase or decrease) hematopoietic function, thereby influencing one or more of: (1) regulation of hematopoiesis; (2) modulation of haemostasis; (3) modulation of an inflammatory response; (4) modulation of neoplastic growth, e.g., inhibition of tumor growth; and/or (5) regulation of thrombolysis.

[1562] Accordingly, TANGO 354 polypeptides, nucleic acids, and modulators thereof can be used to treat a variety of hematopoietic diseases including, but not limited to, myeloid disorders and/or lymphoid malignancies. Exemplary myeloid diseases that can be treated include acute promyeloid leukemia (APML), acute myelogenous leukemia (AML) and chronic myelogenous leukemia (CML) (reviewed in Vaickus, 1991, Crit Rev. in Oncol./Hemotol. 11:267-97). Exemplary lymphoid malignancies that can be treated using these molecules include acute lymphoblastic leukemia (ALL) which includes B-lineage ALL and T-lineage ALL, chronic lymphocytic leukemia (CLL), prolymphocytic leukemia (PLL), hairy cell leukemia (HLL) and Waldrenström's macroglobulinemia (WM). Additional forms of malignant lymphomas include non-Hodgkin lymphoma and variants thereof, peripheral T cell lymphomas, adult T cell leukemia/lymphoma (ATL), cutaneous T-cell lymphoma (CTCL), large granular lymphocytic leukemia (LGF) and Hodgkin's disease.

[1563] In one embodiment, TANGO 354 polypeptides, nucleic acids, and modulators thereof can be used to treat a variety of neoplastic diseases, including malignancies of the various organ systems, such as affecting lung, breast, lymphoid, gastrointestinal, and genito-urinary tract, as well as adenocarcinomas which include malignancies such as most colon cancers, renal-cell carcinoma, prostate cancer and/or testicular tumors, non-small cell carcinoma of the lung, cancer of the small intestine and cancer of the esophagus.

[1564] The term “carcinoma” is art recognized and refers to malignancies of epithelial or endocrine tissues including respiratory system carcinomas, gastrointestinal system carcinomas, genitourinary system carcinomas, testicular carcinomas, breast carcinomas, prostatic carcinomas, endocrine system carcinomas, and melanomas. Exemplary carcinomas include those forming from tissue of the cervix, lung, prostate, breast, head and neck, colon and ovary. The term also includes carcinosarcomas, e.g., which include malignant tumors composed of carcinomatous and sarcomatous tissues. An “adenocarcinoma” refers to a carcinoma derived from glandular tissue or in which the tumor cells form recognizable glandular structures. The term “sarcoma” is art recognized and refers to malignant tumors of mesenchymal derivation.

[1565] TANGO 354 polypeptides, nucleic acids, and modulators thereof can also be used to treat a variety of non-cancerous diseases or conditions involving, for example, aberrant T cell activity (e.g., aberrant T cell proliferation and/or secretion). Examples of such T cell diseases or conditions include inflammation; allergy, for example, atopic allergy; organ rejection after transplantation (e.g., skin graft, cardiac graft, islet graft); graft-versus-host disease; autoimmune diseases (including, for example, diabetes mellitus, arthritis (including rheumatoid arthritis, juvenile rheumatoid arthritis, osteoarthritis, psoriatic arthritis), multiple sclerosis, encephalomyelitis, diabetes, myasthenia gravis, systemic lupus erythematosus, autoimmune thyroiditis, dermatitis (including atopic dermatitis and eczematous dermatitis), psoriasis, Sjogren's Syndrome, including keratoconjunctivitis sicca secondary to Sjögren's Syndrome, alopecia areata, allergic responses due to arthropod bite reactions, Crohm's disease, aphthous ulcer, iritis, conjunctivitis, keratoconjunctivitis, ulcerative colitis, asthma, allergic asthma, cutaneous lupus erythematosus, scleroderma, vaginitis, proctitis, drug eruptions, leprosy reversal reactions, erythema nodosum leprosum, autoimmune uveitis, allergic encephalomyelitis, acute necrotizing hemorrhagic encephalopathy, idiopathic bilateral progressive sensorineural hearing loss, aplastic anemia, pure red cell anemia, idiopathic thrombocytopenia, polychondritis, Wegener's granulomatosis, chronic active hepatitis, Stevens-Johnson syndrome, idiopathic sprue, lichen planus, Crohn's disease, Graves ophthalmopathy, sarcoidosis, primary biliary cirrhosis, uveitis posterior, and interstitial lung fibrosis).

[1566] Further, in light of TANGO 345's presence in a Mixed Lymphocyte Reaction cDNA library, TANGO 345 expression can be utilized as a marker for specific tissues (e.g., lymphoid tissues such as the thymus and spleen) and/or cells (e.g., lymphocytes) in which TANGO 345 is expressed. TANGO 345 nucleic acids can also be utilized for chromosomal mapping.

[1567] Tango378

[1568] A cDNA encoding human TANGO 378 was identified by analyzing the sequences of clones present in a human natural killer cell cDNA library.

[1569] This analysis led to the identification of a clone, jthta028f04, encoding full-length human TANGO 378. The cDNA of this clone is 3258 nucleotides long (FIGS. 180A-180D; SEQ ID NO: 123). The 1584 nucleotide open reading frame of this cDNA (nucleotides 42 to 1625 of SEQ ID NO: 123) encodes a 528 amino acid protein (SEQ ID NO: 124).

[1570] The signal peptide prediction program SIGNALP (Nielsen et al., 1997, Protein Engineering 10:1-6) predicted that human TANGO 378 includes a 21 amino acid signal peptide at amino acid 1 to about amino acid 21 preceding the mature human MANGO 347 protein which corresponds to about amino acid 22 to amino acid 528 of SEQ ID NO: 124.

[1571] Human TANGO 378 that has not been post-translationally modified is predicted to have a molecular weight of 59.0 kDa prior to cleavage of its signal peptide and a molecular weight of 56.7 kDa subsequent to cleavage of its signal peptide.

[1572] Human TANGO 378 is a seven transmembrane G-protein coupled receptor (GPCR) protein having an N-terminal extracellular domain which extends from about amino acid 22 to about amino acid 244; seven transmembrane domains which extend from about amino acids 245 to about amino acid 269, about amino acids 287 to about amino acid 306, about amino acids 323 to about amino acid 343, about amino acids 358 to about amino acid 376, about amino acids 414 to about amino acid 438, about amino acids 457 to about amino acid 477, and about amino acids 485 to about amino acid 504; and a C-terminal cytoplasmic domain which extends from about amino acid 505 to amino acid 528 of SEQ ID NO: 124. FIG. 182 depicts an alignment of each of the transmembrane domains of TANGO 378 with the consensus hidden Markov model seven transmembrane receptor sequences.

[1573] Alternatively, in another embodiment, a human TANGO 378 protein contains an N-terminal extracellular domain which extends from about amino acid 505 to amino acid 528; seven transmembrane domains which extend from about amino acids 245 to about amino acid 269, about amino acids 287 to about amino acid 306, about amino acids 323 to about amino acid 343, about amino acids 358 to about amino acid 376, about amino acids 414 to about amino acid 438, about amino acids 457 to about amino acid 477, and about amino acids 485 to about amino acid 504; and a C-terminal cytoplasmic domain which extends from about amino acid 22 to about amino acid 244 of SEQ ID NO: 124.

[1574] Human TANGO 378 includes three extracellular loops which extend from about amino acid 307 to about amino acid 322, about amino acid 377 to about amino acid 413, and about amino acid 478 to about amino acid 484 of SEQ ID NO: 124.

[1575] Human TANGO 378 includes three intracellular loops which extend from about amino acid 270 to about amino acid 286, about amino acid 344 to about amino acid 357, and about amino acid 439 to about amino acid 456 of SEQ ID NO: 124.

[1576] Based on structural similarities, TANGO 378 family members can be classified as members of the superfamily of G-protein coupled receptor. As used herein, the term “G protein-coupled receptor” or “GPCR” refers to a family of proteins that preferably comprise an N-terminal extracellular domain, seven transmembrane domains (also referred to as membrane-spanning domains), three extracellular domains (also referred to as extracellular loops), three cytoplasmic domains (also referred to as cytoplasmic loops), and a C-terminal cytoplasmic domain (also referred to as a cytoplasmic tail). Members of the GPCR family also share certain conserved amino acid residues, some of which have been determined to be critical to receptor function and/or G protein signaling. An alignment of the transmembrane domains of 44 representative GPCRs can be found at http://mgdkk1.nidll.nih.gov:8000/extended.html.

[1577] Accordingly, in one embodiment, TANGO 378 family members can include at least one, two, three, four, five, six, or preferably, seven transmembrane domains, and thus has a “7 transmembrane receptor profile”. As used herein, the term “7 transmembrane receptor profile” includes an amino acid sequence having at least about 10-300, preferably about 15-200, more preferably about 20-100 amino acid residues, or at least about 22-100 amino acids in length and having a bit score for the alignment of the sequence to the 7 tm_{—}1 family Hidden Markov Model (HMM) of at least 10, preferably 20-30, more preferably 22-40, more preferably 40-50, 50-75, 75-100, 100-200 or greater. The 7 tm_{—}1 family HMM has been assigned the PFAM Accession PF00001 (http://genome.wust1.edu/Pfam/WWWdata/7tm_{—}1.html). In one embodiment, the seven transmembrane domains of TANGO 378 extend from about amino acids 245 to about amino acid 269, about amino acids 287 to about amino acid 306, about amino acids 323 to about amino acid 343, about amino acids 358 to about amino acid 376, about amino acids 414 to about amino acid 438, about amino acids 457 to about amino acid 477, and about amino acids 485 to about amino acid 504; and a C-terminal cytoplasmic domain which extends from about amino acid 505 to amino acid 528 of SEQ ID NO: 122. FIG. 182 depicts an alignment of each of the transmembrane domains of TANGO 378 with the consensus hidden Markov model seven transmembrane receptor domain of SEQ ID NO: 122.

[1578] To identify the presence of a 7 transmembrane receptor profile in a TANGO 378, the amino acid sequence of the protein is searched against a database of HMMs (e.g. the Pfam database, release 2.1) using the default parameters (http://www.sanger.ac.uk/Software/Pfam/HMM_search). For example, the hmmsf program, which is available as part of the HMMER package of search programs, is a family specific default program for PF00001 and score of 15 is the default threshold score for determining a hit. Alternatively, the seven transmembrane domain can be predicted based on stretches of hydrophobic amino acids forming α-helices (SOUSI server). Accordingly, proteins having at least 50-60% identity, preferably about 60-70%, more preferably about 70-80%, or about 80-90% identity with the 7 transmembrane receptor profile of human TANGO 378 are within the scope of the invention.

[1579] TANGO 378 family members can include at least one, preferably two, and most preferably three extracellular loops. As defined herein, the term “loop” includes an amino acid sequence having a length of at least about 4, preferably about 5-10, preferably about 10-20, and more preferably about 20-30, 30-40, 40-50, 50-60, 60-70, 70-80, 80-90, 90-100, or 100-150 amino acid residues, and has an amino acid sequence that connects two transmembrane domains within a protein or polypeptide. Accordingly, the N-terminal amino acid of a loop is adjacent to a C-terminal amino acid of a transmembrane domain in a naturally-occurring TANGO 378 or TANGO 378-like molecule, and the C-terminal amino acid of a loop is adjacent to an N-terminal amino acid of a transmembrane domain in a naturally-occurring TANGO 378 or TANGO 378-like molecule. Examples of TANGO 378 extracellular loops can be found at about amino acids 307-322, 377-413, and 478-484 of SEQ ID NO: 122.

[1580] TANGO 378 family members can include at least one, preferably two, and most preferably three cytoplasmic loops. Examples of TANGO 378 cytoplasmic loops are found at about amino acids 270-286, 344-357, and 439-456 of the polypeptide of SEQ ID NO: 122.

[1581] In one embodiment, a TANGO 378 family member includes a 7 transmembrane receptor profile and three extracellular loops. In another embodiment, a TANGO 378 family member includes a 7 transmembrane receptor profile, three extracellular loops, and three cytoplasmic loops. In yet another embodiment, a TANGO 378 family member includes a 7 transmembrane receptor profile, three extracellular loops, three cytoplasmic loops, and an extracellular N-terminal domain. In another embodiment, a TANGO 378 family member includes a 7 transmembrane receptor profile, three extracellular loops, three cytoplasmic loops, an extracellular N-terminal domain, and a C-terminal cytoplasmic domain. In another embodiment, a TANGO 378 family member includes a 7 transmembrane receptor profile, three extracellular loops, three cytoplasmic loops, an extracellular N-terminal domain, a C-terminal cytoplasmic domain, and a signal peptide.

[1582] N-glycosylation sites are present at amino acids 18-21, 58-61, 65-68, 146-149, 173-176, 179-182, 394-397, and 400-403. A cAMP and cGMP-dependent protein kinase phosphorylation site is present at amino acids 274-277. Protein kinase C phosphorylation sites are present at amino acids 45-47, 93-95, 375-377, 437-439, 449-451, and 505-507. Casein kinase II phosphorylation sites are present at amino acids 23-26, 29-32, and 510-513. N-myristylation sites are present at amino acids 86-91, 101-106, 157-162, 255-260, 311-316, 420-425, and 467-472. A thiol (cysteine) protease histidine site is present at amino acid 410-420.

[1583] Clone jthta028f04, which encodes human TANGO 378, was deposited as EpT378 with the American Type Culture Collection (ATTCC® 10801 University Boulevard, Manassas Va. 20110-2209) on Jun. 18, 1999 and assigned Accession Number PTA-249. This deposit will be maintained under the terms of the Budapest Treaty on the International Recognition of the Deposit of Microorganisms for the Purposes of Patent Procedure. This deposit was made merely as a convenience for those of skill in the art and is not an admission that a deposit is required under 35 U.S.C. §112.

[1584] FIG. 182 depicts a hydropathy plot of human TANGO 378. The hydropathy plot indicates that human TANGO 378 has a signal peptide at its amino terminus and seven hydrophobic domains within human TANGO 378, suggesting that human TANGO 378 is a transmembrane protein.

[1585] Use of TANGO 378 Nucleic Acids, Polypeptides, and Modulators Thereof

[1586] TANGO 378 includes a seven transmembrane domain which is typically found in G-protein coupled receptors. Proteins having such a domain play a role in transducing an extracellular signal, e.g., by interacting with a ligand and/or a cell-surface receptor, followed by mobilization of intracellular molecules that participate in signal transduction pathways (e.g., adenylate cyclase, or phosphatidylinositol 4,5-bisphosphate (PlP2), inositol 1,4,5-triphosphate (IP₃)).

[1587] TANGO 378 polypeptides, nucleic acids, and modulators thereof can be used to modulate function, survival, morphology, migration, proliferation and/or differentiation of cells in the tissues in which it is expressed (e.g., natural killer cells). For example, TANGO 354 polypeptides, nucleic acids, and modulators thereof can be used to modulate an immune response in a subject by, for example, (1) modulating immune cytotoxic responses against pathogenic organisms, e.g., viruses, bacteria, and parasites; (2) by modulating organ rejection after transplantation (e.g., skin graft, cardiac graft, islet graft); (3) by modulating immune recognition and lysis of normal and malignant cells; (4) by modulating T cell diseases; and (5) by controlling neoplastic growth, e.g., inhibition of tumor growth.

[1588] Accordingly, TANGO 378 polypeptides, nucleic acids, and modulators thereof can be used to treat a variety of diseases involving aberrant immune responses, for example, aberrant T cell activity (e.g., aberrant T cell proliferation and/or secretion). A non-limiting list of diseases involving aberrant T cell activity is provided in the section entitled “TANGO 354” above.

[1589] In other embodiments, TANGO 378 polypeptides, nucleic acids, and modulators thereof can be used to treat a variety of neoplastic diseases, including hematopoietic malignancies and including, but not limited to, myeloid disorders, lymphoid malignancies, and/or malignancies of the various organ systems. A non-limiting list of such neoplastic diseases is provided in the section entitled “TANGO 354” above.

[1590] Further, in light of TANGO 378's presence in a Natral Killer cell cDNA library, TANGO 378 expression can be utilized as a marker for specific tissues (e.g., lymphoid tissues such as the thymus and spleen) and/or cells (e.g., Natural Killer cells) in which TANGO 345 is expressed. TANGO 345 nucleic acids can also be utilized for chromosomal mapping.

[1591] The TANGO 339, TANGO 358, TANGO 365, TANGO 368, TANGO 369, TANGO 383, MANGO 346 and MANGO 349 proteins and nucleic acid molecules comprise families of molecules having certain conserved structural and functional features.

[1592] For example, TANGO 339 proteins, TANGO 358 proteins, TANGO 365 proteins, TANGO 368 proteins, TANGO 369 proteins, TANGO 383 proteins, MANGO 346 proteins and MANGO 349 proteins of the invention can have signal sequences. Thus, in one embodiment, a TANGO 339 protein contains a signal sequence of about amino acids 1 to 42.

[1593] In another embodiment, a TANGO 358 protein contains a signal sequence at about amino acids 1 to 42. In another embodiment, a TANGO 365 protein contains a signal sequence of about amino acids 1 to 36. In another embodiment, a TANGO 368 protein contains a signal sequence of about amino acids 1 to 27. In another embodiment, a TANGO 369 protein contains a signal sequence of about amino acids 1 to 26. In another embodiment, a TANGO 383 protein contains a signal sequence of about amino acids 1 to 20. In another embodiment, a MANGO 346 protein contains a signal sequence of about amino acids 1 to 19. In another embodiment, a MANGO 349 protein contains a signal sequence of about amino acids 1 to 26. The signal sequence is usually cleaved during processing of the mature protein. In the case of, e.g., transmembrane 4-type proteins, the signal peptide is generally not cleaved, but becomes a transmembrane-anchoring domain of the polypeptide.

[1594] A TANGO 339 family member can include one or more of the following domains: (1) an extracellular domain; (2) a transmembrane domain; and (3) a cytoplasmic domain. In one embodiment, a TANGO 339 protein contains extracellular domains at about amino acid residues 43 to 61 and 116 to 232, transmembrane domains at about amino acid residues 62 to 84, 93 to 115, and 233 to 254, and cytoplasmic domains at about amino acid residues 85 to 92 and 255 to 270. In this embodiment, the mature TANGO 339 protein corresponds to amino acids 43 to 270.

[1595] In another embodiment, a TANGO 339 protein contains extracellular domains at about amino acid residues 1 to 16, 85 to 92, and 255 to 270, transmembrane domains at about amino acid residues 17 to 41, 62 to 84, 93 to 115, and 233 to 254, and cytoplasmic domains at about amino acid residues 42 to 61 and 116 to 232. In this embodiment, the mature TANGO 339 protein corresponds to amino acids 1 to 270.

[1596] A TANGO 339 family member can include a signal sequence. In certain embodiment, a TANGO 339 family member has the amino acid sequence, and the signal sequence is located at amino acids 1 to 40, 1 to 41, 1 to 42, 1 to 43 or 1 to 44. In such embodiments of the invention, the domains and the mature protein resulting from cleavage of such signal peptides are also included herein. For example, the cleavage of a signal sequence consisting of amino acids 1 to 40 results in an extracellular domain consisting of amino acids 41 to 61 and the mature TANGO 339 protein corresponding to amino 41 to 270.

[1597] A TANGO 339 family member can include one or more transmembrane 4 or transmembrane 4-like domains. A transmembrane 4 domain typically has the following consensus sequence: G-xxx-[LIVMF]-xx-[GSA]-[LIVMF][LIVMF]-G-C-x-[GA]-[STA]-xx-[EG]-xx-[CWN]-[LIVM][LIVM], wherein G is a glycine residue, “x” is any amino acid, [LIVMF] is a leucine, isoleucine, valine, methionine or phenylalanine residue, [GA] is either a glycine or an alanine residue, [STA] is a serine, threonine or alanine residue, [EG] is either a glutamic acid or glycine residue, [CWN] is cysteine, tryptophan or asparagine residue. A transmembrane 4 domain is a characteristic of transmembrane 4 superfamily members which include, for example, CD9 antigen, CD37, CD53, CD63, CD81, and CD82. Transmembrane 4 proteins have the following characteristics: they are type III membrane proteins, which contain an N-terminal membrane-anchoring domain that is not cleaved during biosynthesis and that functions both as a translocation signal and as a membrane anchor; they contain a total of four transmembrane domains and at least seven conserved cysteine residues; and they are approximately 218 to 284 amino acid residues.

[1598] A transmembrane 4-like domain as described herein can have the following consensus sequence: G-xxx-[LIVMF]-xx-[GSA]-[LIVMF]-x-G-C-x-[GA]-[STA]-xx-[EG]-xx-[CWN]-[LIVM][LIVM], wherein G is a glycine residue, “x” is any amino acid, [LIVMF] is a leucine, isoleucine, valine, methionine or phenylalanine residue, [GA] is either a glycine or an alanine residue, [STA] is a serine, threonine or alanine residue, [EG] is either a glutamic acid or glycine residue, [CWN] is cysteine, tryptophan or asparagine residue.

[1599] In one embodiment, a TANGO 339 family member has the amino acid sequence and, preferably, a transmembrane 4 domain-like consensus sequence is located at about amino acid positions 69 to 91. In another embodiment, a TANGO 339 family member has the amino acid sequence and, preferably, a transmembrane 4-like domain is located at about amino acid positions 68 to 260. In another embodiment, a TANGO 339 family member includes one or more transmembrane 4-like domain consensus sequences having an amino acid sequence that is at least about 55%, preferably at least about 65%, more preferably at least 75%, yet more preferably at least about 85%, and most preferably at least about 95% identical to amino acids 69 to 91. In yet another embodiment, a TANGO 339 family member includes one or more transmembrane 4-like domains having an amino acid sequence that is at least about 55%, preferably at least about 65%, more preferably at least 75%, yet more preferably at least about 85%, and most preferably at least about 95% identical to amino acids 68 to 261.

[1600] In another embodiment, a TANGO 339 family member includes one or more transmembrane 4-like domain consensus sequences having an amino acid sequence that is at least about 55%, preferably at least about 65%, more preferably at least 75%, yet more preferably at least about 85%, and most preferably at least about 95% identical to amino acids 69 to 91, and has at least one TANGO 339 biological activity as described herein. In yet another embodiment a TANGO 339 family member includes one or more transmembrane 4-like domains having an amino acid sequence that is at least about 55%, preferably at least about 65%, more preferably at least 75%, yet more preferably at least about 85%, and most preferably at least about 95% identical to amino acids 68 to 261, and has at least one TANGO 339 biological activity as described herein.

[1601] In another embodiment, the transmembrane 4-like domain of TANGO 339 is a transmembrane 4 domain, which has the following consensus sequence: G-xxx-[LIVMF]-xx-[GSA]-[LIVMF][LIVMF]-G-C-x-[GA]-[STA]-xx-[EG]-xx-[CWN]-[LIVM] [LIVM], wherein G is a glycine residue, “x” is any amino acid, [LIVMF] is a leucine, isoleucine, valine, methionine or phenylalanine residue, [GA] is either a glycine or an alanine residue, [STA] is a serine, threonine or alanine residue, [EG] is either a glutamic acid or glycine residue, [CWN] is cysteine, tryptophan or asparagine residue. In this embodiment, a TANGO 339 family member includes one or more transmembrane 4-like domains having an amino acid sequence that is at least about 55%, preferably at least about 65%, more preferably at least 75%, yet more preferably at least about 85%, and most preferably at least about 95% identical to amino acids 68 to 261.

[1602] In another embodiment, a TANGO 339 family member includes one or more peripherin/rom-1 or peripherin/rom-1-like domains. A peripherin/rom-1 domain typically has the following consensus sequence: D-G-V-P-F-S-C-C-N-P-x-S-P-R-P-C, wherein D is an aspartic acid residue, G is a glycine residue, V is a valine residue, P is a proline residue, F is a phenylalanine residue, S is a serine residue, C is a cysteine residue, N is an asparagine residue, x is any amino acid, and R is an arginine residue. Peripherin/rom-1 domains are characteristic of retinal-specific integral membrane proteins that are located at the rims of the photoreceptor disks and that function in disk morphogenesis. Peripherin (or RDS) and rom-1 are examples of proteins that contain the peripherin/rom-1 domain. Defects in the peripherin gene have been shown to cause various diseases, including autosomal dominant retinitis pigmentosa, autosomal dominant punctata albescens, and butterfly-shaped pigment dystrophy.

[1603] A peripherin/rom-1-like domain as described herein has the following consensus sequence: G-V-P-F-S-C-C-x-P, wherein G is a glycine residue, V is a valine residue, P is a proline residue, F is a phenylalanine residue, and C is a cysteine residue. In one embodiment, a TANGO 339 family member has the amino acid sequence and, preferably, a peripherin/rom-1-like domain consensus sequence is located at about amino acid positions 181 to 189. In another embodiment, a TANGO 339 family member has the amino acid sequence of, preferably, a peripherin/rom-1-like domain is located at about amino acid positions 18 to 270.

[1604] In another embodiment, a TANGO 339 family member includes one or more peripherin/rom-1-like domain consensus sequences having an amino acid sequence that is at least about 55%, preferably at least about 65%, more preferably at least 75%, yet more preferably at least about 85%, and most preferably at least about 95% identical to amino acids 181 to 189. In another embodiment, a TANGO 339 family member includes one or more peripherin/rom-1-like domain having an amino acid sequence that is at least about 55%, preferably at least about 65%, more preferably at least 75%, yet more preferably at least about 85%, and most preferably at least about 95% identical to amino acid positions 18 to 270.

[1605] In another embodiment, a TANGO 339 family member includes one or more peripherin/rom-1-like domain consensus sequences having an amino acid sequence that is at least about 55%, preferably at least about 65%, more preferably at least 75%, yet more preferably at least about 85%, and most preferably at least about 95% identical to amino acids 181 to 189, and has at least one TANGO 339 biological activity as described herein. In yet another embodiment, a TANGO 339 family member includes one or more peripherin/rom-1-like domain having an amino acid sequence that is at least about 55%, preferably at least about 65%, more preferably at least 75%, yet more preferably at least about 85%, and most preferably at least about 95% identical to amino acid positions 18 to 270, and has at least one TANGO 339 biological activity as described herein.

[1606] In another embodiment, the peripherin/rom-1-like domain of TANGO 339 is a peripherin/rom-1 domain, which has the following consensus sequence: D-G-V-P-F-S-C-C-N-P-x-S-P-R-P-C, wherein D is an aspartic acid residue, G is a glycine residue, V is a valine residue, P is a proline residue, F is a phenylalanine residue, S is a serine residue, C is a cysteine residue, N is an asparagine residue, x is any amino acid, and R is an arginine residue. In this embodiment, a TANGO 339 family member includes one or more peripherin/rom-1-like domains having an amino acid sequence that is at least about 55%, preferably at least about 65%, more preferably at least 75%, yet more preferably at least about 85%, and most preferably at least about 95% identical to amino acids 18 to 270.

[1607] A TANGO 358 family member can include one or more of the following domains: (1) an extracellular domain; (2) a transmembrane domain; and (3) a cytoplasmic domain. In one embodiment, a TANGO 358 protein contains an extracellular domain at amino acids 1 to about 49 or a mature extracellular domain at about amino acid residues 43 to 49, a transmembrane domain at about amino acid residues 50 to 66, and a cytoplasmic domain at about amino acid residues 67 to 82.

[1608] A TANGO 358 family member can include a signal sequence. In certain embodiment, a TANGO 358 family member has the amino acid sequence, and the signal sequence is located at amino acids 1 to 40, 1 to 41, 1 to 42, 1 to 43 or 1 to 44. In such embodiments of the invention, the mature protein resulting from cleavage of such signal peptides are also included herein. For example, the cleavage of a signal sequence consisting of amino acids 1 to 40 results in an extracellular domain consisting of amino acids residues 41 to 50 and the mature TANGO 368 protein corresponding to amino acid residues 41 to 82.

[1609] A TANGO 365 family member can include a signal sequence. In certain embodiments, a TANGO 365 family member has the amino acid sequence of SEQ ID NO: 130, and the signal sequence is located at amino acids 1 to 34, 1 to 35, 1 to 36, 1 to 37 or 1 to 38. In such embodiments of the invention, the extracellular domain and the mature protein resulting from cleavage of such signal peptides are also included herein. For example, the cleavage of a signal sequence consisting of amino acids 1 to 36 results in a mature TANGO 365 protein corresponding to amino 37 to 165.

[1610] A TANGO 365 family member can include one or more of the following domains: (1) an extracellular domain; (2) two transmembrane domains; and (3) a cytoplasmic domain. Thus, in one embodiment, a TANGO 365 protein contains an extracellular domain of about amino acids 95 to 165, or a mature extracellular domain of about amino acids 30 to 246. In another embodiment, a TANGO 365 protein contains a first transmembrane domain of about amino acids 52 to 70. In another embodiment, an protein contains a cytoplasmic domain of about amino acids 71 to 77. In another embodiment, a TANGO 365 protein contains a second transmembrane domain of about amino acids 78 to 94. In yet another embodiment, a TANGO 365 protein is a mature protein containing an extracellular domain, two transmembrane domains and a cytoplasmic domain of about amino acids 37 to 165.

[1611] A TANGO 368 family member can include a signal sequence. In certain embodiments, a TANGO 368 family member has the amino acid sequence of SEQ ID NO: 132, and the signal sequence is located at amino acids 1 to 25, 1 to 26, 1 to 27, 1 to 28 or 1 to 29. In such embodiments of the invention, the mature protein resulting from cleavage of such signal peptides are also included herein. For example, the cleavage of a signal sequence consisting of amino acids 1 to 27 results in a mature TANGO 368 protein corresponding to amino 28 to 59.

[1612] A TANGO 369 family member can include a signal sequence. In certain embodiments, a TANGO 369 family member has the amino acid sequence of SEQ ID NO: 134, and the signal sequence is located at amino acids 1 to 24, 1 to 25, 1 to 26, 1 to 27 or 1 to 28. In such embodiments of the invention, the mature protein resulting from cleavage of such signal peptides are also included herein. For example, the cleavage of a signal sequence consisting of amino acids 1 to 26 results in a mature TANGO 368 protein corresponding to amino 27 to 58.

[1613] A TANGO 383 family member can include a signal sequence. In certain embodiments, a TANGO 383 family member has the amino acid sequence of SEQ ID NO: 136, and the signal sequence is located at amino acids 1 to 18, 1 to 19, 1 to 20, or 1 to 21. In such embodiments of the invention, the extracellular domain and the mature protein resulting from cleavage of such signal peptides are also included herein. For example, the cleavage of a signal sequence consisting of amino acids 1 to 20 results in a mature TANGO 383 protein corresponding to amino 21 to 140.

[1614] A TANGO 383 family member can include one or more of the following domains: (1) an extracellular domain; (2) two transmembrane domains; and (3) a cytoplasmic domain. In one embodiment, a TANGO 383 protein contains a cytoplasmic domain of about amino acids 21 to 49. In another embodiment, a TANGO 383 protein contains a first transmembrane domain of about amino acids 50 to 70. In another embodiment, a TANGO 383 protein contains an extracellular domain of about amino acids 71 to 115. In another embodiment, a TANGO 383 protein contains a second transmembrane domain of about amino acids 116 to 133. In yet another embodiment, a TANGO 383 protein is a mature protein containing an extracellular domain, two transmembrane domains and a cytoplasmic domain of about amino acids 21 to 140.

[1615] A MANGO 346 family member can include a signal sequence. In certain embodiments, a MANGO 346 family member has the amino acid sequence of SEQ ID NO: 138, and the signal sequence is located at amino acids 1 to 17, 1 to 18, 1 to 19, 1 to 20 or 1 to 21. In such embodiments of the invention, the extracellular domain and the mature protein resulting from cleavage of such signal peptides are also included herein. For example, the cleavage of a signal sequence consisting of amino acids 1 to 19 results in the mature MANGO 346 protein corresponding to amino 20 to 60.

[1616] A MANGO 349 family member can include a signal sequence. In certain embodiments, a MANGO 349 family member has the amino acid sequence of SEQ ID NO: 140, and the signal sequence is located at amino acids 1 to 24, 1 to 25, 1 to 26, 1 to 27 or 1 to 28. In such embodiments of the invention, the extracellular domain and the mature protein resulting from cleavage of such signal peptides are also included herein. For example, the cleavage of a signal sequence consisting of amino acids 1 to 26 results in the mature MANGO 349 protein corresponding to amino 27 to 167.

[1617] Human TANGO 339

[1618] A cDNA encoding human TANGO 339 was identified by analyzing the sequences of clones present in a human fetal library for sequences that encode wholly secreted or transmembrane proteins. This analysis led to the identification of a clone, jthga100g01, encoding full-length human TANGO 339. The human TANGO 339 cDNA of this clone is 2715 nucleotides long (FIGS. 198A-198B; SEQ ID NO: 125). The open reading frame of this cDNA (nucleotides 210 to 1019 of SEQ ID NO: 125) encodes a 270 amino acid transmembrane protein (SEQ ID NO: 126).

[1619] FIG. 199 depicts a hydropathy plot of human TANGO 339.

[1620] The signal peptide prediction program SIGNALP (Nielsen et al., 1997, Protein Engineering 10: 1-6) predicted that human TANGO 339 includes a 42 amino acid signal peptide (amino acid 1 to amino acid 42) preceding the mature human TANGO 339 protein (corresponding to amino acid 43 to amino acid 270). In instances wherein the signal peptide is cleaved, the molecular weight of human TANGO 339 protein without post-translational modifications is 30.7 kDa prior to the cleavage of the signal peptide, and 25.6 kDa after cleavage of the signal peptide. The presence of a methionine residue at positions 56, 67 and 72 indicates that there can be alternative forms of human TANGO 339 of 215 amino acids, 204 amino acids, and 199 amino acids, respectively.

[1621] Human TANGO 339 protein is a transmembrane protein that contains extracellular domains at amino acid residues 43 to 61 and 116 to 232, transmembrane domains at amino acid residues 62 to 84, 93 to 115, and 233 to 254, and cytoplasmic domains at amino acid residues 85 to 92 and 255 to 270 of SEQ ID NO: 126.

[1622] In instances wherein the signal peptide is not cleaved, human TANGO 339 has extracellular domains at amino acid residues 1 to 16, 85 to 92, and 255 to 270, transmembrane domains at amino acid residues 17 to 41, 62 to 84, 93 to 115, and 233 to 254, and cytoplasmic domains of amino acid residues 42 to 61 and 116 to 232 of SEQ ID NO: 126.

[1623] Alternatively, in another embodiment, a human TANGO 339 protein contains cytoplasmic domains at amino acid residues 43 to 61 and 116 to 232, transmembrane domains at amino acid residues 62 to 84, 93 to 115, and 233 to 254, and extracellular domains at amino acid residues 85 to 92 and 255 to 270.

[1624] In one embodiment of a nucleotide sequence of human TANGO 339, the nucleotide at position 29 is adenine (A). In this embodiment, the amino acid at position 10 is lysine (K). In an alternative embodiment, a species variant of human TANGO 339 has a nucleotide at position 29 which is guanine (G). In this embodiment, the amino acid at position 10 is arginine (R), i.e., a conservative substitution.

[1625] In another embodiment of a nucleotide sequence of human TANGO 339, the nucleotide at position 59 is thymine (T). In this embodiment, the amino acid at position 20 is phenylalanine (F). In an alternative embodiment, a species variant of human TANGO 339 has a nucleotide at position 59 which is adenine (A). In this embodiment, the amino acid at position 20 is tyrosine (Y), i.e., a conservative substitution.

[1626] In another embodiment of a nucleotide sequence of human TANGO 339, the nucleotide at position 119 is cytosine (C). In this embodiment, the amino acid at position 40 is alanine (A). In an alternative embodiment, a species variant of human TANGO 339 has a nucleotide at position 119 which is thymine (T). In this embodiment, the amino acid at position 40 is valine (V), i.e., a conservative substitution.

[1627] In another embodiment of a nucleotide sequence of human TANGO 339, the nucleotide at position 180 is cytosine (C). In this embodiment, the amino acid at position 60 is aspartate (D). In an alternative embodiment, a species variant of human TANGO 339 has a nucleotide at position 180 which is guanine (G). In this embodiment, the amino acid at position 60 is glutamate (E), i.e., a conservative substitution.

[1628] Human TANGO 339 includes a transmembrane 4-like domain (at amino acids 68 to 260 of SEQ ID NO: 126) and a peripherin/rom-1-like domain (at amino acids 18 to 270 of SEQ ID NO: 126).

[1629] Human TANGO 339 has an N-glycosylation site with the sequence NCSG (at amino acid residues 169 to 172). Two protein kinase C phosphorylation sites are present in human TANGO 339. The first has the sequence SEK (at amino acid residues 42 to 44) and the second has the sequence SYR (at amino acid residues 133 to 135). Human TANGO 339 has three casein kinase II phosphorylation sites. The first has the sequence SYRD (at amino acid residues 133 to 136), the second has the sequence SKWD (at amino acid residues 210 to 213), and the third has the sequence SDIE (at amino acid residues 259 to 262). Six N-myristylation sites are present in human TANGO 339. The first has the sequence GCVGAL (at amino acid residues 79 to 84), the second has the sequence GASYSR (at amino acid residues 172 to 177), the third has the sequence GVPFSC (at amino acid residues 181 to 186), the fourth has the sequence GCIQAL (at amino acid residues 220 to 225), the fifth has the sequence GVFIAI (at amino acid residues 238 to 243), and the sixth has the sequence GIFLAR (at amino acid residues 250 to 255). Human TANGO 339 has a prokaryotic membrane lipoprotein lipid attachment site with the sequence VVMFTLGFAGC (at amino acid residues 70 to 80).

[1630] The human TANGO 339 gene maps to human chromosome 10 between markers D10S201 and D10S551. As retinal G protein coupled receptor and pulmonary-associated protein Al map to this region of chromosome 10, TANGO 339 nucleic acids, proteins and modulators thereof can be used to diagnose disorders associated with G protein coupled receptors and/or modulate G protein coupled receptor-related processes, e.g., retinal processes and/or pulmonary-related processes.

[1631] FIG. 200 shows an alignment of the human TANGO 339 amino acid sequence with the human CD9 antigen amino acid sequence (Accession Number NM_{—}001769). The alignment shows that there is a 24.1% overall amino acid sequence identity between human TANGO 339 and human CD9 antigen. The CD9 antigen is a widely expressed cell surface glycoprotein that has been shown to be involved in such processes as cell activation, proliferation, and adhesion. For example, CD9 antigen expression on platelets mediates platelet activation and aggregation. CD9 antigen has also been shown to be expressed by neural cells and can play a role in intercellular signaling in the nervous system, in particular, controlling cellular attraction or repulsion in guiding neural growth to target points. Further, the CD9 antigen has been shown to associate with beta 1 integrins and other transmembrane 4 superfamily members, including CD81 and CD82. As such TANGO 339 proteins, nucleic acids and modulators thereof could be useful in modulating cellular interaction such as between immune cells, and also can be involved in modulating intercellular signaling, such as neural cell intercellular signaling.

[1632] FIGS. 201A-201B shows an alignment of the nucleotide sequence of human CD9 antigen coding region (Accession Number NM_{—}001769) and the nucleotide sequence of human TANGO 339 coding region. The alignment shows a 45.9% overall sequence identity between the two nucleotide sequences. The full-length human CD9 antigen nucleic acid sequence (Accession Number NP_{—}001760) and human TANGO 339 cDNA have an overall sequence identity of 30.3%.

[1633] Clone EpT339, which encodes human TANGO 339, was deposited with the American Type Culture Collection (10801 University Boulevard, Manassas, Va. 20110-2209) on Jun. 29, 1999 and assigned Accession Number PTA-292. This deposit will be maintained under the terms of the Budapest Treaty on the International Recognition of the Deposit of Microorganisms for the Purposes of Patent Procedure. This deposit was made merely as a convenience for those of skill in the art and is not an admission that a deposit is required under 35 U.S.C. §112.

[1634] Uses of TANGO 339 Nucleic Acids, Polypeptides, and Modulators Thereof

[1635] As TANGO 339 was originally found in a human fetal library, TANGO 339 nucleic acids, proteins, and modulators thereof can be used to diagnose disorders and/or modulate the proliferation, development, differentiation, and/or function of cells, tissues and/or organs, e.g., the proliferation of tissues and cells of lymphoid origin and neural origin. TANGO 339 nucleic acids, proteins and modulators thereof can be used to treat immune related disorders, e.g., immunodeficiency disorders (e.g., HIV), viral disorders, cancers, autoimmune disorders, (e.g., arthritis and graft rejection) and inflammatory disorders (e.g., bacterial or viral infection, psoriasis, septicemia, arthritis, allergic reactions). TANGO 339 nucleic acids, proteins, and modulators thereof can be used to diagnose disorders and/or modulate the development of cells, tissues and/or organs in the embryo and/or fetus.

[1636] In light of the fact that TANGO 339 has characteristics of transmembrane 4 proteins, TANGO 339 nucleic acids, proteins and modulators thereof can be utilized to modulate (e.g., stabilize, promote, inhibit or disrupt) cellular activation, cellular proliferation, motility, and differentiation. For example, such TANGO 339 compositions and modulators thereof can be used to modulate binding to extracellular matrix (ECM)-associated factors such as integrins and can function to modulate ligand binding to cell surface receptors.

[1637] In further light of the fact that TANGO 339 has characteristics of transmembrane 4 proteins, TANGO 339 nucleic acids, proteins and modulators thereof can be used to modulate disorders associated with aberrant signal transduction in response to ECM-associated proteins and cell surface receptors such as other transmembrane 4 proteins. TANGO 339 nucleic acids, proteins and modulators thereof can be utilized to modulate the development and progression of proliferative disorders, e.g., neoplasms or tumors (such as carcinomas, sarcomas, adenomas or myeloid lymphomas) associated with cancer, (e.g., fibrosarcoma, myxosarcoma, liposarcoma, chondrosarcoma, osteogenic sarcoma, chordoma, angiosarcoma, endotheliosarcoma, lymphangiosarcoma, lymphangioendotheliosarcoma, synovioma, mesothelioma, Ewing's tumor, leimyosarcoma, rhabdotheliosarcoma, colon sarcoma, pancreatic cancer, breast cancer, ovarian cancer, prostate cancer, squamous cell carcinoma, basal cell carcinoma, adenocarcinoma, sweat gland carcinoma, sebaceous gland carcinoma, papillary carcinoma, papillary adenocarcinomas, cystadenocarcinoma, medullary carcinoma, bronchogenic carcinoma, renal cell carcinoma, hematoma, bile duct carcinoma, melanoma, choriocarcinoma, semicoma, embryonal carcinoma, Wilms' tumor, cervical cancer, testicular tumor, lung carcinoma, small cell carcinoma, bladder carcinoma, epithelial carcinoma, glioma, astrocytoma, medulloblastoma, craniopharyngioma, ependynoma, pinealoma, hemangioblastoma, retinoblastoma; leukemias, e.g. acute lymphocytic leukemia and acute myelocytic leukemia (myelolastic, promyelocytic, myelomonocytic, monocytic and erythroleukemia); chronic leukemia (chronic myelocytic (granulocytic) leukemia and chronic lymphocytic leukemia); and polycythemia vera, lymphoma (Hodgkin's disease and non-Hodgkin's diseases), multiple myeloma and Waldrenström's macroglobulinemia.

[1638] TANGO 339 proteins exhibit similarity to human CD9 antigen, a member of the transmembrane 4 superfamily. In light of this, TANGO 339 nucleic acids, proteins and modulators thereof can be utilized to modulate platelet activation and aggregation. For example, antagonists to TANGO 339 action, such as peptides, antibodies or small molecules that decrease or block TANGO 339 binding to extracellular matrix components (e.g., integrins) or that prevent TANGO 339 signaling, can be used as platelet activation and aggregation blockers. In another example, agonists that mimic TANGO 339 activity, such as peptides, antibodies or small molecules, can be used to induce platelet activation and aggregation. Antibodies may activate or inhibit the cell adhesion, proliferation and activation, and may help in treating inflammation, cancer, cardiovascular disease or stroke by affecting these cellular processes. TANGO 339 nucleic acids, proteins and modulators thereof can be utilized to modulate platelet-related processes and disorders, e.g., Glanzmann's thromboasthemia, which is a bleeding disorder characterized by failure of platelet aggregation in response to cell stimuli.

[1639] In further light of the fact that TANGO 339 proteins exhibit similarity to human CD9 antigen, TANGO 339 nucleic acids, proteins and modulators thereof can be utilized to modulate intercellular signaling in the nervous system. The CD9 antigen, which is expressed at the surface of central nervous system (CNS) mature myelin, may modulate intercellular signal transduction and enhance myelin membrane adhesion to extracellular matrices at very late stages of development, thereby playing a role in the maintenance of the entire myelin sheath.

[1640] In light, in part, of the fact that TANGO 339 proteins contain peripherin/rom-1-like domains, TANGO 339 nucleic acids, proteins and modulators thereof can be utilized to modulate the development and function of the eye, such as retinal development and function, (e.g., photoreceptor disk morphogenesis). TANGO 339 nucleic acids, proteins and modulators thereof can be utilized to treat eye diseases and/or disorders, e.g., autosomal dominant retinitis pigmentosa, autosomal dominant punctata albescens, butterfly-shaped pigment dystrophy, cataracts, macular degeneration, myopia, stigmatism and retinoblastoma.

[1641] As TANGO 339 maps to a region of chromosome 10 which encodes polypeptides expressed in the lung, TANGO 339 nucleic acids, proteins and modulators thereof can be utilized to modulate the development, differentiation and activity of pulmonary structures, e.g., lung. TANGO 339 nucleic acids, proteins and modulators thereof can be utilized to modulate or treat pulmonary disorders, such as atelectasis, pulmonary congestion or edema, cystic fibrosis, chronic obstructive airway disease (e.g., emphysema, chronic bronchitis, bronchial asthma, and bronchiectasis), diffuse interstitial diseases (e.g., sarcoidosis, pneumoconiosis, hypersensitivity pneumonitis, Goodpasture's syndrome, idiopathic pulmonary hemosiderosis, pulmonary alveolar proteinosis, desquamative interstitial pneumonitis, chronic interstitial pneumonia, fibrosing alveolitis, hamman-rich syndrome, pulmonary eosinophilia, diffuse interstitial fibrosis, Wegener's granulomatosis, lymphomatoid granulomatosis, and lipid pneumonia), lung cancer or tumors (e.g., bronchogenic carcinoma, bronchiolovlveolar carcinoma, bronchial carcinoid, hamartoma, and mesenchymal tumors).

[1642] As TANGO 339 nucleic acids exhibit homology to a human brain EST (Accession Number Q59384, disclosed in Patent No. WP 93/16178), TANGO 339 nucleic acids, proteins and modulators thereof can be utilized to modulate processes involved in the development, differentiation and activity of the brain, including, but not limited to development, differentiation and activation of neuronal cells and glial cells (e.g., oligodendrocytes astrocytes), and amelioration of one or more symptoms associated with abnormal function of such cell types. TANGO 339 nucleic acids, proteins and modulators thereof can be utilized to treat neural diseases and/or disorders, e.g. epilepsy, spinal cord injuries, infarction, infection, malignancy, paraneoplastic syndromes, neuropsychiatric disorders (e.g., schizophrenia, depression, anxiety disorders, and anorexia nervosa), and neurodegenerative diseases including, but not limited to, Alzheimer's disease, Parkinson's disease, Huntington's Chorea, amyotrophic lateral sclerosis and progressive supra-nuclear palsy.

[1643] TANGO 339 expression can be utilized as a marker (e.g., an in situ marker) for specific tissues (e.g., the brain) and/or cells (e.g., neurons) in which TANGO 339 is expressed. TANGO 339 nucleic acids can also be utilized for chromosomal mapping, or as chromosomal markers, e.g., in radiation hybrid mapping.

[1644] Human TANGO 358

[1645] A cDNA encoding human TANGO 358 was identified by analyzing the sequences of clones present in a fetal thymus library for sequences that encode a wholly secreted or transmembrane protein. This analysis led to the identification of a clone, jthTb128c07 encoding full-length human TANGO 358. The human TANGO 358 cDNA of this clone is 1608 nucleotides long (FIG. 202; SEQ ID NO: 127). The open reading frame of this cDNA (nucleotides 184 to 429 of SEQ ID NO: 127) encodes a 82 amino acid transmembrane protein (SEQ ID NO: 128).

[1646] FIG. 203 depicts a hydropathy plot of human TANGO 358.

[1647] The signal peptide prediction program SIGNALP (Nielsen et al., 1997, Protein Engineering 10:1-6) predicted that human TANGO 358 includes a 42 amino acid signal peptide (amino acid 1 to amino acid 42) preceding the mature human TANGO 358 protein (corresponding to amino acid 43 to amino acid 82). The molecular weight of human TANGO 358 protein without post-translational modifications is 9.5 kDa prior to the cleavage of the signal peptide and 4.5 kDa after cleavage of the signal peptide. The presence of a methionine residue at positions 17, 20 and 63 indicates that there can be alternative forms of human TANGO 358 of 66 amino acids, 63 amino acids, and 20 amino acids.

[1648] Human TANGO 358 is a transmembrane protein which can include one or more of the following domains: (1) an extracellular domain; (2) a transmembrane domain; and (3) a cytoplasmic domain. The human TANGO 358 protein contains an extracellular domain at amino acid residues 43 to 49, a transmembrane domain at amino acid residues 50 to 66, and a cytoplasmic domain at amino acid residues 67 to 82 of SEQ ID NO: 128.

[1649] Alternatively, in another embodiment, a human TANGO 358 protein contains a cytoplasmic domain at amino acid residues 43 to 49, a transmembrane domain at amino acid residues 50 to 66, and an extracellular domain at amino acid residues 67 to 82. Further, human TANGO 358 has a protein kinase C phosphorylation site with the sequence SIK (at amino acid residues 45 to 47).

[1650] In one embodiment of a nucleotide sequence of human TANGO 358, the nucleotide at position 20 is adenine (A). In this embodiment, the amino acid at position 7 is histidine (H). In an alternative embodiment, a species variant of human TANGO 358 has a nucleotide at position 20 which is guanine (G). In this embodiment, the amino acid at position 7 is arginine (R), i.e., a conservative substitution.

[1651] In one embodiment of a nucleotide sequence of human TANGO 358, the nucleotide at position 35 is thymine (T). In this embodiment, the amino acid at position 12 is valine (V). In an alternative embodiment, a species variant of human TANGO 358 has a nucleotide at position 35 which is cytosine (C). In this embodiment, the amino acid at position 12 is alanine (A), i.e., a conservative substitution.

[1652] In one embodiment of a nucleotide sequence of human TANGO 358, the nucleotide at position 85 is thymine (T). In this embodiment, the amino acid at position 29 is serine (S). In an alternative embodiment, a species variant of human TANGO 358 has a nucleotide at position 85 which is adenine (A). In this embodiment, the amino acid at position 29 is threonine (T), i.e., a conservative substitution.

[1653] In one embodiment of a nucleotide sequence of human TANGO 358, the nucleotide at position 91 is cytosine (C). In this embodiment, the amino acid at position 31 is glutamine (Q). In an alternative embodiment, a species variant of human TANGO 358 has a nucleotide at position 91 which is guanine (G). In this embodiment, the amino acid at position 31 is glutamate (E), i.e., a conservative substitution.

[1654] Clone EpT358, which encodes human TANGO 358, was deposited with the American Type Culture Collection (10801 University Boulevard, Manassas, Va. 20110-2209) on Jun. 29, 1999, and assigned Accession Number PTA-292. This deposit will be maintained under the terms of the Budapest Treaty on the International Recognition of the Deposit of Microorganisms for the Purposes of Patent Procedure. This deposit was made merely as a convenience for those of skill in the art and is not an admission that a deposit is required under 35 U.S.C. §112.

[1655] Uses of TANGO 358 Nucleic Acids Polypeptides, and Modulators Thereof

[1656] As TANGO 358 was originally found in a fetal thymus library, TANGO 358 nucleic acids, proteins, and modulators thereof can be used to diagnose thymus associated disorders. TANGO 358 nucleic acids, proteins, and modulators thereof can also be used modulate the proliferation, development, differentiation, maturation and/or function of thymocytes, e.g., modulate development and maturation of T-lymphocytes. TANGO 358 nucleic acids, proteins and modulators thereof can be utilized to modulate immune-related processes such as the ability to modulate host immune response by, e.g., modulating the formation of and/or binding to immune complexes, and modulating the positive and negative selection of thymocytes. Such TANGO 358 compositions and modulators thereof can be utilized, e.g., to ameliorate incidence of any symptoms associated with disorders that involve such limmune-related processes, including, but not limited to infection and autoimmune disorders (e.g., insulin-dependent mellitus, multiple sclerosis, systemic lupus, erythematosus, sjogren's syndrome, autoimmune thyroiditis, idiotpathic Addison's disease, vitiligo, Grave's disease, idiopathic thrombocytopenia purpura, rheumatoid arthritis, and scleroderma). TANGO 358 nucleic acids, proteins and modulators thereof can also be utilized to treat viral infections, inflammatory immune disorders and immune-related cancers including but not limited to, leukemia (e.g., acute leukemia, chronic leukemia, Hodgkin's disease non-Hodgkin's lymphoma,and multiple myeloma).

[1657] Disorders associated with TANGO 358 activity, including those which TANGO 358 proteins, nucleic acids and modulators thereof may be an antagonist can be used to treat include immune disorders, e.g., autoimmune disorders (e.g., arthritis, graft rejection (e.g., allograft rejection), T cell disorders (e.g., AIDS)) and inflammatory disorders (e.g., bacterial infection, psoriasis, septicemia, cerebral malaria, inflammatory bowel disease, arthritis (e.g., rheumatoid arthritis, osteoarthritis), and allergic inflammatory disorders (e.g., asthma, psoriasis)). Disorders associated with modulated TANGO 358 activity can also include apoptotic disorders (e.g., rheumatoid arthritis, systemic lupus erythematosus, insulin-dependent diabetes mellitus), cytotoxic disorders, septic shock, cachexia, and proliferative disorders (e.g., B cell cancers stimulated by TNF).

[1658] In light of the fact that TANGO 358 was isolated from a thymus library, TANGO 358 proteins, nucleic acids and modulators thereof can be used to treat disorders that include TNF-related disorders (e.g., acute myocarditis, myocardial infarction, congestive heart failure, T cell disorders (e.g., dermatitis, fibrosis)), differentiative and apoptotic disorders, and disorders related to angiogenesis (e.g., tumor formation and/or metastasis, cancer). Modulators of TANGO 358 expression and/or activity can be used to treat such disorders.

[1659] As TANGO 358 is a transmembrane protein, TANGO 358 nucleic acids, proteins and modulators thereof can be utilized to diagnose disorders and/or modulate intercellular signaling pathways, for example by disrupting ligand-receptor interactions or cellular interactions with the extra-cellular matrix.

[1660] TANGO 358 expression can be utilized as a marker (e.g., an in situ marker) for specific tissues (e.g., the thymus) and/or cells (e.g., T-lymphocytes) in which TANGO 358 is expressed. TANGO 358 nucleic acids can also be utilized for chromosomal mapping, or as chromosomal markers, e.g., in radiation hybrid mapping.

[1661] Human TANGO 365

[1662] A cDNA encoding TANGO 365 was identified by analyzing the sequences of clones present in a human prostate fibroblast library for sequences that encode wholly secreted or transmembrane proteins. This analysis led to the identification of a clone, jthqc001g06, encoding full-length human TANGO 365. The TANGO 365 cDNA of this clone is 1338 nucleotides long (FIG. 204; SEQ ID NO: 129). The open reading frame of this cDNA (nucleotides 56 to 550 of SEQ ID NO: 129) encodes a 165 amino acid transmembrane protein (SEQ ID NO: 130).

[1663] FIG. 205 depicts a hydropathy plot of human TANGO 365. The dashed vertical line separates the signal sequence (amino acids 1 to 36 of SEQ ID NO: 130) on the left from the mature protein (amino acids 37 to 165 of SEQ ID NO: 130) on the right.

[1664] The signal peptide prediction program SIGNALP (Nielsen et al., 1997, Protein Engineering 10:1-6) predicted that human TANGO 365 includes a 36 amino acid signal peptide (amino acid 1 to amino acid 36) preceding the mature protein (corresponding to amino acid 37 to amino acid 165). The molecular weight of TANGO 365 protein without post-translational modifications is 17.4 kDa prior to the cleavage of the signal peptide, 13.6 kDa after cleavage of the signal peptide. The presence of a methionine residue at positions 16, 35 and 81 indicates that there can be alternative forms of human TANGO 365 of 150 amino acids, 131 amino acids, and 65 amino acids, respectively.

[1665] Human TANGO 365 is a transmembrane protein which can include one or more of the following domains: (1) an extracellular domain; (2) a transmembrane domain; and (3) a cytoplasmic domain. The human TANGO 365 protein contains two extracellular domains; one at amino acid residues 37 to 51; and a second at amino acid residues 95 to 165, two hydrophobic transmembrane domains; one at amino acids 52 to 70; and a second at amino acids 78 to 94, and a cytoplasmic domain at amino acid residues 71 to 77 of SEQ ID NO: 130.

[1666] Alternatively, in another embodiment, a human TANGO 365 protein contains two cytoplasmic domains; one at amino acid residues 37 to 51; and a second at amino acid residues 95 to 165, two hydrophobic transmembrane domains; one at amino acids 52 to 70; and a second at amino acids 78 to 94, and an extracellular domain at amino acid residues 71 to 77 of SEQ ID NO: 130.

[1667] In one embodiment of a nucleotide sequence of human TANGO 365, the nucleotide at position 14 is cytosine (C). In this embodiment, the amino acid at position 5 is alanine (A). In an alternative embodiment, a species variant of human TANGO 365 has a nucleotide at position 14 which is thymidine (T). In this embodiment, the amino acid at position 5 is valine (V), i.e., a conservative substitution.

[1668] In one embodiment of a nucleotide sequence of human TANGO 365, the nucleotide at position 41 is guanine (G). In this embodiment, the amino acid at position 14 is arginine (R). In an alternative embodiment, a species variant of human TANGO 365 has a nucleotide at position 41 which is adenine (A). In this embodiment, the amino acid at position 14 is histidine (H), i.e., a conservative substitution.

[1669] In one embodiment of a nucleotide sequence of human TANGO 365, the nucleotide at position 59 is cytosine (C). In this embodiment, the amino acid at position 20 is threonine (T). In an alternative embodiment, a species variant of human TANGO 365 has a nucleotide at position 59 which is guanine (G). In this embodiment, the amino acid at position 20 is serine (S), i.e., a conservative substitution.

[1670] In one embodiment of a nucleotide sequence of human TANGO 365, the nucleotide at position 115 is adenine (A). In this embodiment, the amino acid at position 39 is asparagine (N). In an alternative embodiment, a species variant of human TANGO 365 has a nucleotide at position 115 which is guanine (G). In this embodiment, the amino acid at position 39 is aspartate (D), i.e., a conservative substitution.

[1671] One protein kinase C phosphorylation site is present in human TANGO 365. The site has the sequence SLR and is found (at amino acids 139 to 141). The TANGO 365 protein has four N-myristoylation sites. The first has the sequence GGTRCR and is found (at amino acids 18 to 23), the second has the sequence GTSMAC and is found (at amino acids 32 to 37), the third has the sequence GAACSL and is found (at amino acids 87 to 92), and the fourth has the sequence GSSDSS and is found (at amino acids 144 to 149). Human TANGO 365 also has an amidation site which has the sequence of LGRR (at amino acids 69 to 72).

[1672] Clone EpT365, which encodes human TANGO 365, was deposited with the American Type Culture Collection (10801 University Boulevard, Manassas, Va. 20110-2209) on Jun. 29, 1999 and assigned Accession Number PTA-291. This deposit will be maintained under the terms of the Budapest Treaty on the International Recognition of the Deposit of Microorganisms for the Purposes of Patent Procedure. This deposit was made merely as a convenience for those of skill in the art and is not an admission that a deposit is required under 35 U.S.C. §112.

[1673] Uses of TANGO 365 Nucleic Acids Polypeptides, and Modulators Thereof

[1674] TANGO 365 was identified as being expressed in a prostate fibroblast library. In light of this, TANGO 365 nucleic acids, proteins and modulators thereof can be utilized to diagnose disorders and/or modulate processes involved in prostate development, differentiation and activity, including, but not limited to development, and differentiation and activation of prostate tissues and cells as well as any function associated with such cells, and amelioration of one or more symptoms associated with abnormal function of such cell types. Such disorders can include, but are not limited to, malignant or benign prostate cell growth. Such disorders can include, but are not limited to, malignant or benign prostate cell growth. The TANGO 365 proteins can be used to treat subjects with or without prostate cancer e.g., prostatitis, benign prostatic hypertrophy, benign prostatic hyperplasia (BPH), prostatic paraganglioma, prostate adenocarcinoma, prostatic intraepithelial neoplasia, prostato-rectal fistulas, atypical prostatic stromal lesions.

[1675] TANGO 365 nucleic acids, proteins, and modulators thereof can also be used to treat disorders of the cells and tissues in which it is expressed. As TANGO 365 is a transmembrane protein, proteins, nucleic acids and modulators thereof can be used to diagnose disorders and/or modulate intercellular signaling processes by disrupting or enhancing ligand-receptor or cell interaction with the extracellular matrix. Further, TANGO 365 could be used in detection and diagnostic assays to assay for normal or inappropriate expression of TANGO 365 proteins in aberrantly growing cells.

[1676] TANGO 365 expression can be utilized as a marker (e.g., an in situ marker) for specific tissues (e.g., the prostate) and/or cells (e.g., fibroblasts) in which TANGO 365 is expressed. TANGO 365 nucleic acids can also be utilized for chromosomal mapping, or as chromosomal markers, e.g., in radiation hybrid mapping.

[1677] Human TANGO 368

[1678] A cDNA encoding human TANGO 368 was identified by analyzing the sequences of clones present in a natural killer cell library for sequences that encode wholly secreted or transmembrane proteins. This analysis led to the identification of a clone, jthta080f06, encoding full-length human TANGO 368. The human TANGO 368 cDNA of this clone is 983 nucleotides long (FIG. 206; SEQ ID NO: 131). The open reading frame of this cDNA (nucleotides 152 to 328 of SEQ ID NO: 131) encodes a 59 amino acid secreted protein (SEQ ID NO: 132).

[1679] FIG. 207 depicts a hydropathy plot of human TANGO 368.

[1680] The signal peptide prediction program SIGNALP (Nielsen et al., 1997, Protein Engineering 10:1-6) predicted that human TANGO 368 includes a 26 amino acid signal peptide (amino acid 1 to amino acid 27 of SEQ ID NO: 132) preceding the mature human TANGO 368 protein (corresponding to amino acid 28 to amino acid 59 of SEQ ID NO: 132). The molecular weight of TANGO 368 protein without post-translational modifications is 6.5 kDa prior to the cleavage of the signal peptide and 3.5 kDa after cleavage of the signal peptide.

[1681] In one embodiment of a nucleotide sequence of human TANGO 368, the nucleotide at position 8 is cytosine (C). In this embodiment, the amino acid at position 3 is threonine (T). In an alternative embodiment, a species variant of human TANGO 368 has a nucleotide at position 8 which is guanine (G). In this embodiment, the amino acid at position 3 is serine (S), i.e., a conservative substitution.

[1682] In one embodiment of a nucleotide sequence of human TANGO 368, the nucleotide at position 10 is cytosine (C). In this embodiment, the amino acid at position 4 is glutamine (Q). In an alternative embodiment, a species variant of human TANGO 368 has a nucleotide at position 10 which is guanine (G). In this embodiment, the amino acid at position 4 is glutamate (E), i.e., a conservative substitution.

[1683] In one embodiment of a nucleotide sequence of human TANGO 368, the nucleotide at position 16 is cytosine (C). In this embodiment, the amino acid at position 6 is leucine (L). In an alternative embodiment, a species variant of human TANGO 368 has a nucleotide at position 16 which is guanine (G). In this embodiment, the amino acid at position 6 is valine (V), i.e., a conservative substitution.

[1684] In one embodiment of a nucleotide sequence of human TANGO 368, the nucleotide at position 110 is adenine (A). In this embodiment, the amino acid at position 37 is histidine (H). In an alternative embodiment, a species variant of human TANGO 368 has a nucleotide at position 110 which is guanine (G). In this embodiment, the amino acid at position 37 is arginine (R), i.e., a conservative substitution.

[1685] Human TANGO 368 has an N-glycosylation site with the sequence NFTC (at amino acid residues 40 to 43), a protein kinase C phosphorylation site with the sequence SLK (at amino acid residues 24 to 26), and a casein kinase II phosphorylation site with the sequence TQPE (at amino acid residues 27 to 30).

[1686] FIGS. 208A-208B depicts a local alignment of the nucleotide sequence of full length human TANGO 368 and a fragment of the human T-cell receptor gamma V1 gene region (Accession Number AF057177), which maps to a region of human chromosome 7. The full-length nucleic acid sequence of human TANGO 368 has 99.3% identity to a 973 bp fragment of the human T-cell receptor gamma VI gene region (Accession Number AF057177).

[1687] Northern blots were performed to analyze the expression of human TANGO 368 mRNA in human tissues. A weak signal was observed in the spleen and lymph node, however, no expression was detected in the thymus, peripheral blood leukocytes or fetal liver.

[1688] Clone EpT368, which encodes human TANGO 368, was deposited with the American Type Culture Collection (10801 University Boulevard, Manassas, Va. 20110-15 2209) on Jun. 29, 1999 and assigned Accession Number PTA-291. This deposit will be maintained under the terms of the Budapest Treaty on the International Recognition of the Deposit of Microorganisms for the Purposes of Patent Procedure. This deposit was made merely as a convenience for those of skill in the art and is not an admission that a deposit is required under 35 U.S.C. §112.

[1689] Uses of TANGO 368 Nucleic Acids, Polypeptides, and Modulators Thereof

[1690] As TANGO 368 was originally found in a natural killer cell library, TANGO 368 nucleic acids, proteins, and modulators thereof can be used to diagnose disorders and/or modulate the proliferation, development, differentiation, and/or function of immune cells, such as lymphocytes, e.g., natural killer cells, T-cells and B-cells. TANGO 368 nucleic acids, proteins and modulators thereof can be utilized to modulate immune-related processes e.g., the host immune response by, for example, modulating the formation of and/or binding to immune complexes, detection and defense against surface antigens and bacteria, and immune surveillance for rapid removal or pathogens. Such TANGO 368 nucleic acids, proteins and modulators thereof can be utilized, e.g., to ameliorate incidence of any symptoms associated with disorders that involve such immune-related processes, including, but not limited to viral or bacterial infection, autoimmune disorders (e.g., Grave's disease, Hashimoto's disease, and arthritis), immunodeficiency disorders (e.g., HIV, and inflammatory disorders (e.g., asthma, arthritis, psoriasis, septicemia, inflammatory bowel disease and allergies).

[1691] As TANGO 368 exhibits expression in the spleen, TANGO 368 nucleic acids, proteins, and modulators thereof can be used to diagnose disorders and/or modulate the proliferation, differentiation, and/or function of cells that form the spleen, e.g., cells of the splenic connective tissue, e.g., splenic smooth muscle cells and/or endothelial cells of the splenic blood vessels. TANGO 368 nucleic acids, proteins, and modulators thereof can also be used to modulate the proliferation, differentiation, and/or function of cells that are processed, e.g., regenerated or phagocytized within the spleen, e.g., erythrocytes and/or B and T lymphocytes and macrophages. Thus, TANGO 368 nucleic acids, proteins, and modulators thereof can be used to treat spleen, e.g., the fetal spleen, associated diseases and disorders. Examples of splenic diseases and disorders include e.g., splenic lymphoma and/or splenomegaly, and/or phagocytotic disorders, e.g., those inhibiting macrophage engulfment of bacteria and viruses in the bloodstream.

[1692] As TANGO 368 exhibits expression in the lymph nodes, TANGO 368 nucleic acids, proteins, and modulators thereof can be used to diagnose disorders and/or modulate the proliferation, differentiation, and/or function of cells that form the lymph node, e.g. cells of the lymph node connective tissue, e.g., lymph node smooth muscle cells and/or endothelial cells of the lymph node blood vessels. TANGO 368 nucleic acids, proteins, and modulators thereof can also be used to diagnose disorders and/or modulate the proliferation, differentiation, and/or function of cells that are processed, e.g., phagocytized within the lymph node, e.g., erythrocytes and/or B and T lymphocytes and macrophages. Thus, TANGO 368 nucleic acids, proteins, and modulators thereof can be used to treat lymph node associated diseases and disorders. Examples of lymph node diseases and disorders include e.g., lymphadenopathy, lymphoma, and/or phagocytotic disorders, e.g., those inhibiting macrophage engulfinent of bacteria and viruses in the bloodstream.

[1693] In light of the fact that TANGO 368 is homologous to the T-cell receptor gamma (TCRy) locus, TANGO 368 nucleic acids, proteins and modulators thereof can be utilized to modulate the recognition of antigens in association with the major histocompatibility complex. TANGO 368 nucleic acids, proteins and modulators thereof can be utilized to modulate diseases and/or disorders associated with aberrant TCR-MHC interactions. Further, TANGO 368 nucleic acids, proteins and modulators thereof can be utilized to modulate cell-cell receptor interactions.

[1694] As TANGO 368 exhibits homology to human T-cell receptor gamma V1 gene region (Accession Numbers AF057177), which maps to a region of chromosome 7, TANGO 368 nucleic acids, proteins and modulators thereof can be utilized to diagnose disorders and/or modulate diseases associated with that region of chromosome 7, e.g., Stiff-Mann syndrome.

[1695] As TANGO 368 is a secreted protein and thus likely a signaling molecule, TANGO 368 nucleic acids, proteins or modulators thereof, can be used to modulate TANGO 368 biological activities, which include, e.g., (1) the ability to modulate, e.g., stabilize, promote, inhibit or disrupt, protein-protein interactions (e.g., homophilic and/or heterophilic), and protein-ligand interactions, e.g., in receptor-ligand recognition; (2) ability to modulate cell-cell interactions; (3) the ability to modulate the proliferation, differentiation and/or activity of neural cells; and (4) the ability to modulate intracellular signaling cascades (e.g., signal transduction cascades).

[1696] TANGO 368 expression can be utilized as a marker (e.g., an in situ marker) for specific tissues (e.g., the thymus) and/or cells (e.g., natural killer cells) in which TANGO 368 is expressed. TANGO 368 nucleic acids can also be utilized for chromosomal mapping, or as chromosomal markers, e.g., in radiation hybrid mapping.

[1697] Human TANGO 369

[1698] A cDNA encoding human TANGO 369 was identified by analyzing the sequences of clones present in a natural killer cell library for sequences that encode wholly secreted or transmembrane proteins. This analysis led to the identification of a clone, jthta088h08, encoding full-length human TANGO 369. The human TANGO 369 cDNA of this clone is 1119 nucleotides long (FIG. 209; SEQ ID NO: 133). The open reading frame of this cDNA (nucleotides 162 to 335 of SEQ ID NO: 133) encodes a 58 amino acid secreted protein (SEQ ID NO: 134).

[1699] FIG. 210 depicts a hydropathy plot of human TANGO 369.

[1700] The signal peptide prediction program SIGNALP (Nielsen et al., 1997, Protein Engineering 10:1-6) predicted that human TANGO 369 includes a 26 amino acid signal peptide (amino acid 1 to amino acid 26) preceding the mature human TANGO 369 protein (corresponding to amino acid 27 to amino acid 58). The molecular weight of TANGO 369 protein without post-translational modifications is 6.8 kDa prior to the cleavage of the signal peptide and 3.7 kDa after cleavage of the signal peptide. The presence of a methionine residue at positions 17 and 250 indicates that there can be alternative forms of human TANGO 369 of 42 amino acids of SEQ ID NO: 134.

[1701] In one embodiment of a nucleotide sequence of human TANGO 369, the nucleotide at position 58 is cytosine (C). In this embodiment, the amino acid at position 20 is leucine (L). In an alternative embodiment, a species variant of human TANGO 369 has a nucleotide at position 58 which is guanine (G). In this embodiment, the amino acid at position 20 is valine (V), i.e., a conservative substitution.

[1702] In one embodiment of a nucleotide sequence of human TANGO 369, the nucleotide at position 68 is guanine (G). In this embodiment, the amino acid at position 23 is arginine (R). In an alternative embodiment, a species variant of human TANGO 369 has a nucleotide at position 68 which is adenine (A). In this embodiment, the amino acid at position 23 is lysine (K), i.e., a conservative substitution.

[1703] In one embodiment of a nucleotide sequence of human TANGO 369, the nucleotide at position 70 is thymine (T). In this embodiment, the amino acid at position 24 is leucine (L). In an alternative embodiment, a species variant of human TANGO 369 has a nucleotide at position 70 which is adenine (A). In this embodiment, the amino acid at position 24 is threonine (T), i.e., a conservative substitution.

[1704] In one embodiment of a nucleotide sequence of human TANGO 369, the nucleotide at position 120 is guanine (G). In this embodiment, the amino acid at position 40 is glutamate (E). In an alternative embodiment, a species variant of human TANGO 369 has a nucleotide at position 120 which is cytosine (C). In this embodiment, the amino acid at position 40 is aspartate (D), i.e., a conservative substitution.

[1705] Northern blots were performed to analyze the expression of human TANGO 369 mRNA in human tissues. A very weak signal was observed in the spleen and lymph node, however, no expression was detected in the thymus, peripheral blood leukocytes or fetal liver.

[1706] Clone EpT369, which encodes human TANGO 369, was deposited with the American Type Culture Collection (10801 University Boulevard, Manassas, Va. 20110-2209) on Jun. 29, 1999 and assigned Accession Number PTA-295. This deposit will be maintained under the terms of the Budapest Treaty on the International Recognition of the Deposit of Microorganisms for the Purposes of Patent Procedure. This deposit was made merely as a convenience for those of skill in the art and is not an admission that a deposit is required under 35 U.S.C. §112.

[1707] Uses of TANGO 369 Nucleic Acids, Polypeptides, and Modulators Thereof

[1708] As TANGO 369 was originally found in a natural killer cell library, TANGO 369 nucleic acids, proteins, and modulators thereof can be used to diagnose disorders and/or modulate the proliferation, development, differentiation, and/or function of lymphocytes, e.g., natural killer cells. TANGO 369 nucleic acids, proteins and modulators thereof can be utilized to modulate immune-related processes, e.g., the host immune response by, for example, modulating the formation of and/or binding to immune complexes, detection and defense against surface antigens and bacteria, and immune surveillance for rapid removal or pathogens. Such TANGO 369 compositions and modulators thereof can be utilized, e.g., to ameliorate incidence of any symptoms associated with disorders that involve such immune-related processes, including, but not limited to viral or bacterial infection, autoimmune disorders (e.g., Grave's disease, Hashimoto's disease, arthritis, graft rejection), and inflammatory disorders (e.g., bacterial or viral infection, psoriasis, allergies and inflammatory bowel diseases).

[1709] As TANGO 369 exhibits expression in the spleen, TANGO 369 nucleic acids, proteins, and modulators thereof can be used to diagnose disorders and/or modulate the proliferation, differentiation, and/or function of cells that form the spleen, e.g. cells of the splenic connective tissue, e.g., splenic smooth muscle cells and/or endothelial cells of the splenic blood vessels. TANGO 369 nucleic acids, proteins, and modulators thereof can also be used to modulate the proliferation, differentiation, and/or function of cells that are processed, e.g., regenerated or phagocytized within the spleen, e.g. erythrocytes and/or B and T lymphocytes and macrophages. Thus, TANGO 369 nucleic acids, proteins, and modulators thereof can be used to treat spleen, e.g., the fetal spleen, associated diseases and disorders. Examples of splenic diseases and disorders include e.g., splenic lymphoma and/or splenomegaly, and/or phagocytotic disorders, e.g., those inhibiting macrophage engulfment of bacteria and viruses in the bloodstream.

[1710] As TANGO 369 exhibits expression in the lymph nodes, TANGO 369 nucleic acids, proteins, and modulators thereof can be used to diagnose disorders and/or modulate the proliferation, differentiation, and/or function of cells that form the lymph node, e.g., cells of the lymph node connective tissue, e.g., lymph node smooth muscle cells and/or endothelial cells of the lymph node blood vessels. TANGO 369 nucleic acids, proteins, and modulators thereof can also be used to modulate the proliferation, differentiation, and/or function of cells that are processed, e.g., phagocytized within the lymph node, e.g. erythrocytes and/or B and T lymphocytes and macrophages. Thus, TANGO 369 nucleic acids, proteins, and modulators thereof can be used to treat lymph node associated diseases and disorders. Examples of lymph node diseases and disorders include e.g., lymphadenopathy, lymphoma, and/or phagocytotic disorders, e.g., those inhibiting macrophage engulfment of bacteria and viruses in the bloodstream.

[1711] TANGO 369 is associated with immune cells. As such, immune disorders associated TANGO 369 nucleic acids, proteins and modulators thereof can be used to diagnose disorders and/or modulate or treat immune disorders that include, but are not limited to, immune proliferative disorders (e.g., carcinoma, lymphoma, e.g., follicular lymphoma), and disorders associated with fighting pathogenic infections, e.g., bacterial (e.g., chlamydia) infection, parasitic infection, and viral infection (e.g., HSV infection), and pathogenic disorders associated with immune disorders (e.g., immunodeficiency disorders, such as HIV).

[1712] Other immune disorders associated with TANGO 369 activity, for which TANGO 369 nucleic acids, proteins and modulators thereof can be used to modulate, identify, diagnose or treat, include, e.g., autoimmune disorders, such as arthritis, graft rejection (e.g., allograft rejection), T cell disorders (e.g., AIDS)) and inflammatory disorders, such as bacterial infection, psoriasis, septicemia, cerebral malaria, inflammatory bowel disease, arthritis (e.g., rheumatoid arthritis, osteoarthritis), and allergic inflammatory disorders (e.g., asthma, psoriasis), apoptotic disorders (e.g., rheumatoid arthritis, systemic lupus erythematosus, insulin-dependent diabetes mellitus), cytotoxic disorders, septic shock, cachexia, and proliferative disorders (e.g., B cell cancers stimulated by TNF).

[1713] Other TANGO 369 associated immune disorders include TNF related disorders (e.g., acute myocarditis, myocardial infarction, congestive heart failure, T cell disorders (e.g., dermatitis, fibrosis)), differentiative and apoptotic disorders, and disorders related to angiogenesis (e.g., tumor formation and/or metastasis, cancer). TANGO 369 nucleic acids, proteins and modulators thereof can be used to treat such disorders.

[1714] As TANGO 369 is a secreted protein, TANGO 369 nucleic acids, proteins and modulators thereof can be utilized to modulate intercellular signaling pathways, for example by disrupting ligand-receptor interactions or cellular interactions with the extra-cellular matrix.

[1715] As TANGO 369 is a secreted protein and thus likely a signaling molecule, TANGO 369 nucleic acids, proteins or modulators thereof can be used TANGO 369 biological activities, which can also include, e.g., (1) the ability to modulate, e.g., stabilize, promote, inhibit or disrupt, protein-protein interactions (e.g., homophilic and/or heterophilic), and protein-ligand interactions, e.g., in receptor-ligand recognition; (2) ability to modulate cell-cell interactions; (3) the ability to modulate the proliferation, differentiation and/or activity of neural cells; and (4) the ability to modulate intracellular signaling cascades (e.g., signal transduction cascades).

[1716] TANGO 369 expression can be utilized as a marker (e.g., an in situ marker) for specific tissues (e.g., the thymus) and/or cells (e.g., natural killer cells) in which TANGO 369 is expressed. TANGO 369 nucleic acids can also be utilized for chromosomal mapping, or as chromosomal markers, e.g., in radiation hybrid mapping.

[1717] Human TANGO 383

[1718] A cDNA encoding human TANGO 383 was identified by analyzing the sequences of clones present in a human prostate epithelium cDNA library. This analysis led to the identification of a clone, jthqb083b10, encoding full-length TANGO 383. The human cDNA of this clone is 1386 nucleotides long (FIG. 211; SEQ ID NO: 135). The open reading frame of this cDNA (nucleotides 104 to 523 of SEQ ID NO: 135) encodes a 140 amino acid TANGO 383 transmembrane protein (SEQ ID NO: 136).

[1719] FIG. 212 depicts a hydropathy plot of human TANGO 383. The dashed vertical line separates the signal sequence (amino acids 1 to 20 of SEQ ID NO: 136) on the left from the mature protein (amino acids 21 to 140 of SEQ ID NO: 136) on the right.

[1720] The signal peptide prediction program SIGNALP (Nielsen, et al. (1997) Protein Engineering 10:1-6) predicted that TANGO 383 includes a 20 amino acid signal peptide (amino acid 1 to amino acid 20 of SEQ ID NO: 136) preceding the mature protein (corresponding to amino acid 21 to amino acid 140 of SEQ ID NO: 136). The molecular weight of TANGO 383 without post-translational modifications is 14.9 kDa prior to the cleavage of the signal peptide, 12.7 kDa after cleavage of the signal peptide.

[1721] TANGO 383 is a transmembrane protein which contains one or more of the following domains: (1) an extracellular domain; (2) a transmembrane domain; and (3) a cytoplasmic domain. The TANGO 383 protein contains an extracellular domain at amino acids 71 to 115, a first transmembrane domain at amino acid residues 50 to 70, a second transmembrane domain at amino acid residues 116 to 133, a first cytoplasmic domain at amino acid residues 21 to 49 and a second cytoplasmic domain at amino acid residues 134 to 140 of SEQ ID NO: 136.

[1722] Alternatively, in another embodiment, a TANGO 383 protein contains a cytoplasmic domain at amino acids 71 to 115, a first transmembrane domain at amino acid residues 50 to 70, a second transmembrane domain at amino acid residues 116 to 133, a first extracellular domain at amino acid residues 21 to 49 and a second extracellular domain at amino acid residues 134 to 140 of SEQ ID NO: 136.

[1723] In one embodiment of a nucleotide sequence of human TANGO 383, the nucleotide at position 4 is cytosine (C). In this embodiment, the amino acid at position 2 is leucine (L). In an alternative embodiment, a species variant of human TANGO 383 has a nucleotide at position 4 which is adenine (A). In this embodiment, the amino acid at position 2 is isoleucine (I), i.e., a conservative substitution.

[1724] In one embodiment of a nucleotide sequence of human TANGO 383, the nucleotide at position 8 is guanine (G). In this embodiment, the amino acid at position 3 is serine (S). In an alternative embodiment, a species variant of human TANGO 383 has a nucleotide at position 8 which is cytosine (C). In this embodiment, the amino acid at position 3 is threonine (T), i.e., a conservative substitution.

[1725] In one embodiment of a nucleotide sequence of human TANGO 383, the nucleotide at position 17 is adenine (A). In this embodiment, the amino acid at position 6 is lysine (K). In an alternative embodiment, a species variant of human TANGO 383 has a nucleotide at position 17 which is guanine (G). In this embodiment, the amino acid at position 6 is arginine (R), i.e., a conservative substitution.

[1726] In one embodiment of a nucleotide sequence of human TANGO 383, the nucleotide at position 57 is cytosine (C). In this embodiment, the amino acid at position 19 is aspartate (D). In an alternative embodiment, a species variant of human TANGO 383 has a nucleotide at position 57 which is guanine (G). In this embodiment, the amino acid at position 19 is glutamate (E), i.e., a conservative substitution.

[1727] One protein kinase C phosphorylation site is present in TANGO 383, and has the sequence SPR (at amino acids 21 to 24). TANGO 383 has one casein kinase II phosphorylation site which has the sequence SKAE (at amino acids 42 to 45). TANGO 383 has three N-myristylation sites. The first has the sequence GVELAS (at amino acids 24 to 29), the second has the sequence GAVLAH (at amino acids 84 to 89), and the third has the sequence GSSDSH (at amino acids 96 to 101). TANGO 383 has a consensus tyrosine phosphorylation site which has the amino acid sequence RGKREAGLY and (at amino acids 33 to 41). TANGO 383 also has an amidation site with the sequence RGKR (at amino acids 33-36).

[1728] FIG. 213 depicts an alignment of the amino acid sequence of TANGO 383 and the amino acid sequence of Neuronal Thread Protein AD7C-NTP. The alignments demonstrates that the amino acid sequences of TANGO 383 and Neuronal Thread Protein AD7C-NTP are 52% identical. This alignment was performed using the ProDom NCBI-BLASTP2 program with graphical output using the following settings: Matrix: BLOSUM62; Expect: 0.1; Filter: none.

[1729] Thus, TANGO 383 exhibits homology to neural thread proteins which are phospho-proteins expressed in the central nervous system which are phosphorylated during neuritic sprouting. Therefore, TANGO 383 nucleic acids, proteins and modulators thereof may be used to diagnose disorders and/or inhibit or modulate neurodegenerative sprouting and synaptic disassociation associated with, e.g., Alzheimer's disease, and other diseases in neural tissue as discussed below.

[1730] Clone EpT383, which encodes human TANGO 383, was deposited with the American Type Culture Collection (10801 University Boulevard, Manassas, Va. 20110-2209) on Jun. 29, 1999 and assigned Accession Number PTA-295. This deposit will be maintained under the terms of the Budapest Treaty on the International Recognition of the Deposit of Microorganisms for the Purposes of Patent Procedure. This deposit was made merely as a convenience for those of skill in the art and is not an admission that a deposit is required under 35 U.S.C. §112.

[1731] Uses of TANGO 383 Nucleic Acids, Polypeptides, and Modulators Thereof

[1732] As TANGO 383 was originally found in a prostate epithelium library, TANGO 383 nucleic acids, proteins, and modulators thereof can be used to diagnose disorders and/or modulate the proliferation, differentiation, and/or function of prostate cells. TANGO 383 nucleic acids, proteins and modulators thereof can be utilized to modulate processes involved in prostate development, differentiation and activity, including, but not limited to development, and differentiation and activation of prostate tissues and cells as well as any function associated with such cells, and amelioration of one or more symptoms associated with abnormal function of such cell types or disorders associated with such cell types. Such disorders can include, but are not limited to, malignant or benign prostate cell growth or inflammatory disorders (e.g., prostatitis, benign prostatic hypertrophy, benign prostatic hyperplasia (BPH), prostatic paraganglioma, prostate adenocarcinoma, prostatic intraepithelial neoplasia, prostato-rectal fistulas, atypical prostatic stromal lesions).

[1733] TANGO 383 exhibits homology to neural thread proteins which are phospho-proteins expressed in the central nervous system which are phosphorylated during neuritic sprouting. Therefore, TANGO 383 nucleic acids, proteins and modulators thereof may be used to diagnose disorders and/or inhibit or modulate neurodegenerative sprouting and synaptic disassociation associated with, e.g., Alzheimer's disease. TANGO 383 nucleic acids, proteins and modulators thereof may also be utilized to diminish the effects of stroke and other neural damage, e.g., spinal cord injuries, infarction, infection, malignancy, exposure to toxic agents, nutritional deficiency, paraneoplastic syndromes, and degenerative nerve diseases including but not limited to Alzheimer's disease, Parkinson's disease, Huntington's Chorea, amyotrophic lateral sclerosis, progressive supra-nuclear palsy, and other dementias.

[1734] As TANGO 383 is a transmembrane protein, TANGO 383 nucleic acids, proteins and modulators thereof can be utilized to modulate intercellular signaling pathways, for example by disrupting ligand-receptor interactions or cellular interactions with the extra-cellular matrix.

[1735] As TANGO 383 is a transmembrane protein and thus likely a signaling molecule, TANGO 383 nucleic acids, proteins or modulators thereof, activities can include, e.g., (1) the ability to modulate, e.g., stabilize, promote, inhibit or disrupt, protein-protein interactions (e.g., homophilic and/or heterophilic), and protein-ligand interactions, e.g., in receptor-ligand recognition; (2) ability to modulate cell-cell interactions; (3) the ability to modulate the proliferation, differentiation and/or activity of neural cells; and (4) the ability to modulate intracellular signaling cascades (e.g., signal transduction cascades).

[1736] TANGO 383 expression can be utilized as a marker (e.g., an in situ marker) for specific tissues (e.g., the prostate) and/or cells (e.g., epithelial cells) in which TANGO 383 is expressed. TANGO 383 nucleic acids can also be utilized for chromosomal mapping, or as chromosomal markers, e.g., in radiation hybrid mapping.

[1737] Human MANGO 346

[1738] A MANGO 346 cDNA was identified from clones present in a human brain library among sequences that encode signal peptides. This analysis led to the identification of a clone, jlhbab575g04, encoding full-length human MANGO 346. The human MANGO 346 cDNA of this clone is 1196 nucleotides long (FIG. 214; SEQ ID NO: 138). The open reading frame of this cDNA (nucleotides 319 to 498 of SEQ ID NO: 137) encodes a 60 amino acid secreted protein (SEQ ID NO: 138).

[1739] FIG. 215 depicts a hydropathy plot of human MANGO 346. The dashed vertical line separates the signal sequence (amino acids 1 to 19 of SEQ ID NO: 138) on the left from the mature protein (amino acids 20 to 60 of SEQ ID NO: 138) on the right.

[1740] The signal peptide prediction program SIGNALP (Nielsen et al., 1997, Protein Engineering 10:1-6) predicted that human MANGO 346 includes a 19 amino acid signal peptide (amino acid 1 to amino acid 19 of SEQ ID NO: 138) preceding the mature human protein (corresponding to amino acid 20 to amino acid 60 of SEQ ID NO: 138). The molecular weight of protein without post-translational modifications is 7.1 kDa prior to the cleavage of the signal peptide, 5.0 kDa after cleavage of the signal peptide.

[1741] In one embodiment of a nucleotide sequence of human MANGO 346, the nucleotide at position 13 is cytosine (C). In this embodiment, the amino acid at position 5 is leucine (L). In an alternative embodiment, a species variant of human MANGO 346 has a nucleotide at position 13 which is adenine (A). In this embodiment, the amino acid at position 5 is isoleucine (I), i.e., a conservative substitution.

[1742] In one embodiment of a nucleotide sequence of human MANGO 346, the nucleotide at position 59 is adenine (A). In this embodiment, the amino acid at position 20 is tyrosine (Y). In an alternative embodiment, a species variant of human MANGO 346 has a nucleotide at position 59 which is thymidine (T). In this embodiment, the amino acid at position 20 is phenylalanine (F), i.e., a conservative substitution.

[1743] In one embodiment of a nucleotide sequence of human MANGO 346, the nucleotide at position 61 is thymidine (T). In this embodiment, the amino acid at position 21 is serine (S). In an alternative embodiment, a species variant of human MANGO 346 has a nucleotide at position 61 which is adenine (A). In this embodiment, the amino acid at position 21 is threonine (T), i.e., a conservative substitution.

[1744] In one embodiment of a nucleotide sequence of human MANGO 346, the nucleotide at position 80 is guanine (G). In this embodiment, the amino acid at position 27 is arginine (R). In an alternative embodiment, a species variant of human MANGO 346 has a nucleotide at position 80 which is adenine (A). In this embodiment, the amino acid at position 27 is lysine (K), i.e., a conservative substitution.

[1745] One protein kinase C phosphorylation site is present in human MANGO 346 which has the sequence, TIK (at amino acids 44 to 46). Human MANGO 346 has three Casein Kinase II phosphorylation sites. The first has the sequence SFLE (at amino acids 21 to 24), the second has the sequence TIKE (at amino acids 44 to 47) and the third has the sequence TYYD (at amino acids 51 to 54). Human MANGO 346 has one prokaryotic membrane lipoprotein lipid attachment site. The sequence is CILPLLLLASC (at amino acids 6 to 16).

[1746] Clone EpM346, which encodes human MANGO 346, was deposited with the American Type Culture Collection (10801 University Boulevard, Manassas, Va. 20110-2209) on Jun. 29, 1999 and assigned Accession Number PTA-291. This deposit will be maintained under the terms of the Budapest Treaty on the International Recognition of the Deposit of Microorganisms for the Purposes of Patent Procedure. This deposit was made merely as a convenience for those of skill in the art and is not an admission that a deposit is required under 35 U.S.C. §112.

[1747] Uses of MANGO 346 Nucleic Acids Polypeptides. and Modulators Thereof

[1748] As MANGO 346 was originally found in a human brain library, nucleic acids, proteins, and modulators thereof can be used to diagnose or identify disorders and/or modulate the proliferation, development, differentiation, and/or function of neural organs, e.g., neural tissues and cells, e.g., cells of the central nervous system, e.g., cells of the peripheral nervous system. MANGO 346 nucleic acids, proteins, and modulators thereof can also be used to diagnose or identify disorders and/or modulate symptoms associated with abnormal neural signaling and function, e.g., epilepsy, spinal cord injuries, infarction, infection, malignancy, exposure to toxic agents, nutritional deficiency, paraneoplastic syndromes, and degenerative nerve diseases including but not limited to Alzheimer's disease, Parkinson's disease, Huntington's Chorea, amyotrophic lateral sclerosis, progressive supra-nuclear palsy, and other dementias.

[1749] MANGO 346 nucleic acids, proteins and modulators thereof can, in addition to the above, be utilized to diagnose disorders, regulate or modulate development and/or differentiation of processes involved in central or peripheral nervous system formation and activity, as well as in ameliorating any symptom associated with a disorder of such cell types, tissues and organs.

[1750] MANGO 346 nucleic acids, proteins and modulators thereof can, in addition to the above, be utilized to regulate or diagnose disorders, modulate development and/or differentiation of processes involved in central or peripheral nervous system formation and activity, as well as in ameliorating any symptom associated with a disorder of such cell types, tissues and organs. Furthermore, the TANGO 346 proteins can be used to disrupt protein interaction or cellular signaling in brain tissues or cells. In particular, TANGO 346 proteins are useful to treat neural related disorders or neural damage, such as for regenerative neural repair after damage by trauma, degeneration, or inflammation e.g., spinal cord injuries, infarction, infection, malignancy, exposure to toxic agents, nutritional deficiency, paraneoplastic syndromes, and degenerative nerve diseases including but not limited to Alzheimer's disease, Parkinson's disease, Huntington's Chorea, amyotrophic lateral sclerosis, progressive supra-nuclear palsy, and other dementias.

[1751] As MANGO 346 is a secreted protein and thus likely a signaling molecule, MANGO 346 nucleic acids, proteins or modulators thereof, can be used to modulate MANGO 346 biological activities, which include, e.g., (1) the ability to modulate, e.g., stabilize, promote, inhibit or disrupt, protein-protein interactions (e.g., homophilic and/or heterophilic), and protein-ligand interactions, e.g., in receptor-ligand recognition; (2) ability to modulate cell-cell interactions; (3) the ability to modulate the proliferation, differentiation and/or activity of neural cells; and (4) the ability to modulate intracellular signaling cascades (e.g., signal transduction cascades).

[1752] MANGO 346 expression can be utilized as a marker (e.g., an in situ marker) for specific tissues (e.g., the brain) and/or cells (e.g., neurons) in which MANGO 346 is expressed. MANGO 346 nucleic acids can also be utilized for chromosomal mapping, or as chromosomal markers, e.g., in radiation hybrid mapping.

[1753] Human MANGO 349

[1754] A cDNA encoding human MANGO 349 was identified by analyzing the sequences of clones present in a human brain library for sequences that encode wholly secreted or transmembrane proteins. This analysis led to the identification of a clone, jlhbae318gd08, encoding full-length human MANGO 349. The human cDNA of this clone is 3649 nucleotides long (FIGS. 216A-216B; SEQ ID NO: 139). The open reading frame of this cDNA (nucleotides 221 to 7218 of SEQ ID NO: 139) encodes a 167 amino acid secreted protein (SEQ ID NO: 140).

[1755] FIG. 217 depicts a hydropathy plot of human MANGO 349.

[1756] The signal peptide prediction program SIGNALP (Nielsen et al., 1997, Protein Engineering 10:1-6) predicted that human MANGO 349 includes a 26 amino acid signal peptide (amino acid 1 to amino acid 26) preceding the mature human protein (corresponding to amino acid 27 to amino acid 167). The molecular weight of human protein without post-translational modifications is 17.6 kDa prior to the cleavage of the signal peptide, 15.1 kDa after cleavage of the signal peptide.

[1757] In one embodiment of a nucleotide sequence of human MANGO 349, the nucleotide at position 4 is adenine (A). In this embodiment, the amino acid at position 2 is threonine (T). In an alternative embodiment, a species variant of human MANGO 349 has a nucleotide at position 4 which is thymine (T). In this embodiment, the amino acid at position 2 is serine (S), i.e., a conservative substitution.

[1758] In one embodiment of a nucleotide sequence of human MANGO 349, the nucleotide at position 61 is adenine (A). In this embodiment, the amino acid at position 21 is isoleucine (I). In an alternative embodiment, a species variant of human MANGO 349 has a nucleotide at position 61 which is cytosine (C). In this embodiment, the amino acid at position 21 is leucine (L), i.e., a conservative substitution.

[1759] In one embodiment of a nucleotide sequence of human MANGO 349, the nucleotide at position 86 is guanine (G). In this embodiment, the amino acid at position 29 is arginine (R). In an alternative embodiment, a species variant of human MANGO 349 has a nucleotide at position 86 which is adenine (A). In this embodiment, the amino acid at position 29 is lysine (K), i.e., a conservative substitution.

[1760] In one embodiment of a nucleotide sequence of human MANGO 349, the nucleotide at position 123 is guanine (G). In this embodiment, the amino acid at position 41 is glutamate (E). In an alternative embodiment, a species variant of human MANGO 349 has a nucleotide at position 123 which is cytosine (C). In this embodiment, the amino acid at position 41 is aspartate (D), i.e., a conservative substitution.

[1761] Two Protein C Kinase phosphorylation sites are present in human MANGO 349. The first has the sequence SLK (at amino acids 136 to 1390) and the second has the sequence SGR (at amino acids 152 to 1540). Two casein kinase II phosphorylation sites are present in human MANGO 349. The first has the sequence SGTE (at amino acids 38 to 410), and the second has the sequence SGRE (at amino acids 152 to 1550). Human MANGO 349 has four N-myristylation sites. The first has the sequence GGILAT (at amino acids 10 to 150), the second has the sequence GTEVAD (at amino acids 39 to 440), the third has the sequence GVAASH (at amino acids 89 to 94), and the fourth has the sequence GGPPSL (at amino acids 132 to 1370).

[1762] Clone EpM349, which encodes human MANGO 349, was deposited with the American Type Culture Collection (10801 University Boulevard, Manassas, Va. 20110-2209) on Jun. 29, 1999 and assigned Accession Number PTA-295. This deposit will be maintained under the terms of the Budapest Treaty on the International Recognition of the Deposit of Microorganisms for the Purposes of Patent Procedure. This deposit was made merely as a convenience for those of skill in the art and is not an admission that a deposit is required under 35 U.S.C. §112.

[1763] Uses of MANGO 349 Nucleic Acids, Polypeptides and Modulators Thereof

[1764] As MANGO 349 was originally found in a human brain library, nucleic acids, proteins, and modulators thereof can be used to diagnose or identify disorders and/or modulate the proliferation, development, differentiation, and/or function of neural organs, e.g., neural tissues and cells, e.g., cells of the central nervous system, e.g., cells of the peripheral nervous system. MANGO 349 nucleic acids, proteins, and modulators thereof can also be used to diagnose or identify disorders and/or modulate symptoms associated with abnormal neural signaling and function, e.g., epilepsy, stroke, traumatic injury, etc.

[1765] MANGO 349 nucleic acids, proteins and modulators thereof can, in addition to the above, be utilized to diagnose disorders, regulate or modulate development and/or differentiation of processes involved in central or peripheral nervous system formation and activity, as well as in ameliorating any symptom associated with a disorder of such cell types, tissues and organs. Furthermore, the TANGO 349 proteins can be used to disrupt protein interaction or cellular signaling in brain tissues or cells. In particular, TANGO 349 proteins could be useful to treat neural related disorders or neural damage, such as for regenerative neural repair after damage by trauma, degeneration, or inflammation e.g., spinal cord injuries, infarction, infection, malignancy, exposure to toxic agents, nutritional deficiency, paraneoplastic syndromes, and degenerative nerve diseases including but not limited to Alzheimer's disease, Parkinson's disease, Huntington's Chorea, amyotrophic lateral sclerosis, progressive supra-nuclear palsy, and other dementias.

[1766] As MANGO 349 is a secreted protein and thus likely a signaling molecular, MANGO 349 nucleic acids, proteins and modulators thereof can be used to diagnose disorders and/or modulate MANGO 349 biological activities, which include, e.g., (1) the ability to modulate, e.g., stabilize, promote, inhibit or disrupt, protein-protein interactions (e.g., homophilic and/or heterophilic), and protein-ligand interactions, e.g. in receptor-ligand recognition; (2) ability to modulate cell-cell interactions; (3) the ability to modulate proliferation, differentiation and/or activity of neural cells; and (4) the ability to modulate intracellular signaling cascades (e.g. signal transduction cascades).

[1767] MANGO 349 expression can be utilized as a marker (e.g., an in situ marker) for specific tissues (e.g., the brain) and/or cells (e.g., neurons) in which MANGO 349 is expressed. MANGO 349 nucleic acids can also be utilized for chromosomal mapping, or as chromosomal markers, e.g., in radiation hybrid mapping.

[1768] INTERCEPT 307 MANGO 511 TANGO 361 and TANGO 499

[1769] The INTERCEPT 307, MANGO 511, TANGO 361 and TANGO 499 proteins and nucleic acid molecules comprise families of molecules having certain conserved structural and functional features.

[1770] For example, the INTERCEPT 307, MANGO 511, TANGO 361 and TANGO 499 proteins of the invention can have signal sequences.

[1771] In one embodiment, an INTERCEPT 307 protein can contain a signal sequence of about amino acids 1 to 23 of SEQ ID NO: 142.

[1772] In another embodiment, a MANGO 511 protein can contain a signal sequence of about 1 to 41 of SEQ ID NO: 144.

[1773] In another embodiment, a TANGO 361 protein can contain a signal sequence of about amino acids 1 to 35 of SEQ ID NO: 146.

[1774] In another embodiment, a TANGO 499 form 1, variant 1 protein can contain a signal sequence of about amino acids 1 to 30 of SEQ ID NO: 148.

[1775] In another embodiment, a TANGO 499 form 2, variant 3 protein can contain a signal sequence of about amino acids 1 to 30 of SEQ ID NO: 150.

[1776] An INTERCEPT 307 family member can include one or more of the following domains: (1) an extracellular domain; (2) a transmembrane domain; and (3) a cytoplasmic domain. In one embodiment, an INTERCEPT 307 protein contains extracellular domains at about amino acid residues 24 to 153, 211 to 228 and 319 to 330, transmembrane domains at about amino acid residues 154 to 175, 192 to 210, 229 to 252, 296 to 318 and 331 to 348 and cytoplasmic domains at about amino acid residues 176 to 191, 253 to 295 and 349 to 362. In this embodiment, the mature INTERCEPT 307 protein corresponds to amino acids 24 to 362 of SEQ ID NO: 142.

[1777] An INTERCEPT 307 family member can include a signal sequence. In certain embodiments, a INTERCEPT 307 family member has the amino acid sequence, and the signal sequence is located at amino acids 1 to 21, 1 to 22, 1 to 23, 1 to 24 or 1 to 25. In such embodiments of the invention, the domains and the mature protein resulting from cleavage of such signal peptides are also included herein. For example, the cleavage of a signal sequence consisting of amino acids 1 to 23 results in an extracellular domain consisting of amino acids 24 to 153 and the mature INTERCEPT 307 protein corresponding to amino acids 24 to 362 of SEQ ID NO: 142.

[1778] An INTERCEPT 307 family member can include one or more Gas vesicle protein GVPc-like domains. A gas vesicle protein GPVc-like domain as described herein can have the following consensus sequence: F-L-Xaa-Xaa-Xaa-Xaa-Xaa-Xaa-Xaa-Xaa-A-Xaa-Q-Xaa-Xaa-Xaa-L-Xaa-Xaa-F, wherein F is phenylalanine, L is leucine, “Xaa” is any amino acid, A is alanine, and Q is glutamine.

[1779] In one embodiment, an INTERCEPT 307 family member has the amino acid sequence and, preferably, a gas vesicle protein GPVc-like domain is located at about amino acid positions 112 to 141. In another embodiment, an INTERCEPT 307 family member has the amino acid sequence and, preferably, a gas vesicle protein GPVc-like consensus sequence is located at about amino acid positions 122 to 141. In another embodiment, an INTERCEPT 307 family member includes one or more gas vesicle protein GPVc-like consensus sequences having an amino acid sequence that is at least about 55%, preferably at least about 65%, more preferably at least 75%, yet more preferably at least about 85%, and most preferably at least about 95% identical to amino acids 112 to 141. In yet another embodiment, an INTERCEPT 307 family member includes one or more gas vesicle protein GPVc-like domains having an amino acid sequence that is at least about 55%, preferably at least about 65%, more preferably at least 75%, yet more preferably at least about 85%, and most preferably at least about 95% identical to amino acids 122 to 141 of SEQ ID NO: 142.

[1780] In another embodiment an INTERCEPT 307 family member includes one or more gas vesicle protein GPVc-like domains having an amino acid sequence that is at least about 55%, preferably at least about 65%, more preferably at least 75%, yet more preferably at least about 85%, and most preferably at least about 95% identical to amino acids 112 to 141, and has at least one INTERCEPT 307 biological activity as described herein. In yet another embodiment, an INTERCEPT 307 family member includes one or more gas vesicle protein GPVc-like domain consensus sequences having an amino acid sequence that is at least about 55%, preferably at least about 65%, more preferably at least 75%, yet more preferably at least about 85%, and most preferably at least about 95% identical to amino acids 122 to 141, and has at least one INTERCEPT 307 biological activity as described herein.

[1781] In another embodiment, the gas vesicle protein GVPc-like domain of INTERCEPT 307 is a gas vesicle protein GVPc domain. A gas vesicle protein GVPc domain typically has the following consensus sequence: F-L-Xaa-Xaa-T-Xaa-Xaa-Xaa-R-Xaa-Xaa-Xaa-A-Xaa-Xaa-Q-Xaa-Xaa-Xaa-L-Xaa-Xaa-F, wherein F is phenylalanine, L is leucine, “Xaa” is any amino acid, T is threonine, R is arginine, A is alanine and Q is glutamine. Gas vesicle protein GVPc domains are found in cyanobacterial and Archaebacteria microorganisms. Gas vesicles are small, hollow, gas filled protein structures that enable the bacteria to position themselves at a favorable depth in a liquid medium for growth. In this embodiment, an INTERCEPT 307 family member includes one or more gas vesicle protein GVPc domains having an amino acid sequence that is at least about 55%, preferably at least about 65%, more preferably at least 75%, yet more preferably at least about 85%, and most preferably at least about 95% identical to amino acids 112 to 141 of SEQ ID NO: 142.

[1782] A MANGO 511 family member can include one or more of the following domains: (1) an extracellular domain; (2) a transmembrane domain; and (3) a cytoplasmic domain. In one embodiment, a MANGO 511 protein contains an extracellular domain at about amino acid residues 42 to 265, a transmembrane domain at about amino acid residues 266 to 284, and a cytoplasmic domain at about amino acid residues 285 to 299. In this embodiment, the mature MANGO 511 protein corresponds to amino acids 42 to 299 of SEQ ID NO: 144.

[1783] A MANGO 511 family member can include a signal sequence. In certain embodiments, a MANGO 511 family member has the amino acid sequence, and the signal sequence is located at amino acids 1 to 39, 1 to 40, 1 to 41, 1 to 42 or 1 to 43. In such embodiments of the invention, the domains and the mature protein resulting from cleavage of such signal peptides are also included herein. For example, the cleavage of a signal sequence consisting of amino acids 1 to 41 results in an extracellular domain consisting of amino acids 42 to 265 and a mature MANGO 511 protein corresponding to amino acids 42 to 299 of SEQ ID NO: 144.

[1784] A MANGO 511 family member can include one or more Ig-like domains. A MANGO 511 Ig-like domain as described herein has the following consensus sequence, beginning about 1 to 15 amino acid residues, more preferably about 3 to 10 amino acid residues, and most preferably about 5 amino acid residues from the domain C-terminus: [FY]-Xaa-C, wherein [FY] is either a phenylalanine or a tyrosine residue (preferably tyrosine), where “Xaa” is any amino acid, and C is a cysteine residue. In one embodiment, a MANGO 511 family member includes one or more Ig-like domains having an amino acid sequence that is at least about 55%, preferably at least about 65%, more preferably at least 75%, yet more preferably at least about 85%, and most preferably at least about 95% identical to amino acids 60 to 118 of SEQ ID NO: 144.

[1785] In another embodiment, a MANGO 511 family member includes one or more MANGO 511 Ig-like domains having an amino acid sequence that is at least about 55%, preferably at least about 65%, more preferably at least about 75%, yet more preferably at least about 85%, and most preferably at least about 95% identical to amino acids 60 to 118, and has a conserved cysteine residue about 8 residues downstream from the N-terminus of the Ig-like domain. In another embodiment, a MANGO 511 family member includes one or more Ig-like domains having an amino acid sequence that is at least 55%, preferably at least about 65%, more preferably at least about 75%, yet more preferably at least about 85%, and most preferably at least about 95% identical to amino acids 60 to 118, has a conserved cysteine residue about 8 residues downstream from the N-terminus of the Ig-like domain, and has a conserved cysteine within the consensus sequence that forms a disulfide with said first conserved cysteine.

[1786] In yet another embodiment, a MANGO 511 family member includes one or more MANGO 511 Ig-like domains having an amino acid sequence that is at least 55%, preferably at least about 65%, more preferably at least about 75%, yet more preferably at least about 85%, and most preferably at least about 95% identical to amino acids 60 to 118, and has a conserved cysteine residue about 8 residues downstream from the N-terminus of the Ig-like domain, has a conserved cysteine within the consensus sequence that forms a disulfide with said first conserved cysteine, and has at least one MANGO 511 biological activity as described herein.

[1787] In another embodiment, the Ig-like domain of MANGO 511 is an Ig domain. An Ig domain as used in the context of MANGO 511 has the following consensus sequence, beginning at about 1 to 15 amino acid residues, more preferably about 3 to 10 amino acid residues, and most preferably about 5 amino acid residues from the C-terminal end of the domain: [FY]-Xaa-C-Xaa-[VA]-COO-, wherein [FY] is either a phenylalanine or a tyrosine residue (preferably tyrosine), where “Xaa” is any amino acid, C is a cysteine residue, [VA] is either valine or an alanine residue (preferably alanine), and COO- is the C-terminus of the domain. In this embodiment, a MANGO 511 family member includes one or more Ig-like domains having an amino acid sequence that is at least about 55%, preferably at least about 65%, more preferably at least 75%, yet more preferably at least about 85%, and most preferably at least about 95% identical to amino acids 60 to 118 of SEQ ID NO: 144.

[1788] A TANGO 361 family member can include one or more of the following domains: (1) an extracellular domain; (2) a transmembrane domain; and (3) a cytoplasmic domain. In one embodiment, a TANGO 361 protein contains an extracellular domain at about amino acid residues 235 to 423 a transmembrane domain at about amino acid residues 217 to 234, and a cytoplasmic domains at about amino acid residues 36 to 216 of SEQ ID NO: 146. In this embodiment, the mature TANGO 361 protein corresponds to amino acids 36 to 423 of SEQ ID NO: 146.

[1789] A TANGO 361 family member can include a signal sequence. In certain embodiments, a TANGO 361 family member has the amino acid sequence, and the signal sequence is located at about amino acids 1 to 33, 1 to 34, 1 to 35, 1 to 36 or 1 to 37. In such embodiments of the invention, the domains and the mature protein resulting from cleavage of such signal peptides are also included herein. For example, the cleavage of a TANGO 361 signal sequence consisting of amino acids 1 to 35 results in an extracellular domain consisting of amino acids 235 to 423 and the mature TANGO 361 protein corresponding to amino acids 36 to 423 of SEQ ID NO: 146.

[1790] A TANGO 361 family member can include one or more SEA domains. As used herein, the term “SEA domain” refers to a protein domain that can be found in TANGO 361 proteins and can regulate protein-protein or protein binding to carbohydrate side chains. A SEA domain typically has about 50-200 amino acid residues, preferably about 75-150 amino acid residues, more preferably about 80-140 amino acid residues, and most preferably about 115-135 amino acid residues of SEQ ID NO: 146.

[1791] A SEA domain typically has the following consensus sequence: h-t-h-Xaa-h-Xaa-h-Xaa-Xaa-Xaa-Xaa-h-Xaa-a-t-t-t-h-t-t-t-Xaa-o-Xaa-Xaa-a-Xaa-Xaa-h-Xaa-t-t-H-Xaa-t-Xaa-H-Xaa-t-Xaa-a-t-t-Xaa-Xaa-Xaa-Xaa-Xaa- Xaa-Xaa-h-h-Xaa-Xaa-Xaa-Xaa-Xaa-Xaa-Xaa-Xaa-t-t-Xaa-Xaa-h-Xaa-Xaa-Xaa-h-Xaa-h-t-h-h-Xaa-t-Xaa-Xaa-Xaa-Xaa-Xaa-t-t-t-h-t-Xaa- Xaa-Xaa-Xaa-t-Xaa-h-t-Xaa-Xaa-Xaa-Xaa-Xaa-h-Xaa-Xaa-Xaa-t-Xaa-Xaa-Xaa-Xaa-t-Xaa-Xaa-t-h-Xaa-Xaa-Xaa-Xaa-t, wherein t is a glycine, proline or polar amino acid, h is a hydrophobic amino acid, a is an aromatic amino acid and o is a serine or threonine. These domains are predominantly found in adhesive proteins present in heavily glycosylated environments. For example, SEA domains are found in a 63 kDa sea urchin sperm protein, agrin, enterokinase, perlecan, the breast cancer marker MUCL (episialin) and the cell surface antigen 114/A10 (Bork and Patthy, (1995) Prot. Sci. 4:1421-1425).

[1792] In one embodiment, a TANGO 361 family member has the amino acid sequence and, preferably, a SEA domain is located at about amino acids 47 to 170. In another embodiment, a TANGO 361 family member includes one or more SEA domains having an amino acid sequence that is at least about 55%, preferably at least about 65%, more preferably at least 75%, yet more preferably at least about 85%, and most preferably at least about 95% identical to amino acids 47 to 170 of SEQ ID NO: 146.

[1793] In another embodiment, a TANGO 361 family member includes one or more SEA domains having an amino acid sequence that is at least about 55%, preferably at least about 65%, more preferably at least 75%, yet more preferably at least about 85%, and most preferably at least about 95% identical to amino acids 44 to 170 of SEQ ID NO: 146, and has at least one TANGO 361 biological activity as described herein.

[1794] A TANGO 361 family member can include a serine protease domain. Serine protease domains are typically found in serine proteases, and can be found in, among other proteins, e.g., blood coagulation factors VII, XI, and X, thrombin, plasminogen, tryptases, such as trypsin, airway trypsin-like proteases, mast cell proteases, and members of the complement system which are known for regulation of energy balance and suppression of infectious agents. As used herein, the term “serine protease domain” refers to a polypeptide sequence that includes about 100-400 amino acid residues, preferably about 150-350 amino acid residues, more preferably about 200-300 amino acid residues, and most preferably about 225-260 amino acid residues. A serine protease typically has two consensus sequences. The first consensus sequence is a histidine active site and has the following sequence: [LIVM]-[ST]-A-[STAG]-H-C, wherein [LIVM] is a leucine, isoleucine, valine, or methionine, [ST] is a serine or threonine, A is alanine, [STAG] is serine, threonine, alanine or glycine, H is histidine and C is cysteine. The second consensus sequence is a serine active site and has the following consensus sequence: [DNSTAGC]-[GSTAPIMVQH]-x(2)-G-[DE]-S-G-[GS]-[SAPHV]-[LIVMFYWH]-[LIVMFYSTANQH], wherein [DNSTAGC] is an aspartic acid, asparagine, serine, threonine, alanine, glycine, or cysteine, [GSTAPIMVQH] is a glycine, serine, threonine, alanine, proline, isoleucine, methionine, valine, glutamine, or histidine, x(2) is two consecutive amino acids, G is a glycine, [DE] is an aspartic acid or glutamic acid, S is a serine, G is a glycine, [GS] is a glycine or serine, [SAPHV] is a serine, alanine, proline, histidine or valine, [LIVMFYWH] is a leucine, isoleucine, valine, methionine, phenylalanine, tyrosine, tryptophan or histidine, [LIVMFYSTANQH] is a leucine, isoleucine, valine, methionine, phenylalanine, tyrosine, serine, threonine, alanine, asparagine, glutamine or histidine.

[1795] In one embodiment, a TANGO 361 family member has the amino acid sequence in which a serine protease domain appears at about amino acids 192 to 417. Preferably, a histidine active site consensus sequence is located at about amino acids 228 to 233 and a serine active site consensus sequence is located at 367 to 378. In another embodiment, a TANGO 361 family member includes one or more serine protease domain consensus sequences having an amino acid sequence that is at least about 55%, preferably at least about 65%, more preferably at least 75%, yet more preferably at least about 85%, and most preferably at least about 95% identical to amino acids 228 to 233 or 367 to 378 of SEQ ID NO: 146.

[1796] In another embodiment, a TANGO 361 family member includes one or more serine protease domain consensus sequences having an amino acid sequence that is at least about 55%, preferably at least about 65%, more preferably at least 75%, yet more preferably at least about 85%, and most preferably at least about 95% identical to amino acids 228 to 233 or 367 to 378 of SEQ ID NO: 146, and has at least one TANGO 361 biological activity as described herein.

[1797] A TANGO 499 family member can include one or more of the following domains: 1) a signal sequence; and 2) a secreted protein. In one embodiment, a TANGO 499 protein is a secreted protein containing a signal sequence of 1 to amino acids and is an immature protein of 254 amino acids. In this embodiment, the mature TANGO 499 protein corresponds to amino acids 31 to 254 of SEQ ID NO: 148. In certain embodiments, a TANGO 499 family member has the amino acid sequence, and contains a signal sequence that is preferably located at about amino acids 1 to 28, 1 to 29, 1 to 31 or 1 to 32. In such embodiments of the invention, the domains and the mature protein resulting from cleavage of such signal peptides are also included herein. For example, the cleavage of a signal sequence consisting of amino acids 1 to 31 results in a mature protein comprising a secreted protein of amino acids 32 to 254 of SEQ ID NO: 148.

[1798] In certain embodiments, a TANGO 499 family member has the amino acid sequence, and contains a signal sequence that is preferably located at about amino acids 1 to 28, 1 to 29, 1 to 31 or 1 to 32. In such embodiments of the invention, the domains and the mature protein resulting from cleavage of such signal peptides are also included herein. For example, the cleavage of a signal sequence consisting of amino acids 1 to 31 results in a mature protein comprising a secreted protein of amino acids 32 to 229 of SEQ ID NO: 148.

[1799] In one embodiment, a TANGO 499 family member is a polypeptide comprising the amino acid sequence of SEQ ID NO: 148. In another embodiment, a TANGO 499 family member is a polypeptide comprising the amino acid sequence of SEQ ID NO: 150.

[1800] Human INTERCEPT 307

[1801] A cDNA encoding human INTERCEPT 307 was identified by analyzing the sequences of clones present in a human TH-2 induced T-cell library for sequences that encode wholly secreted or transmembrane proteins. This analysis led to the identification of a clone, jthtg033c10, encoding full-length human INTERCEPT 307. The human INTERCEPT 307 cDNA of this clone is 2021 nucleotides long (FIGS. 218A-218B; SEQ ID NO: 141). The open reading frame of this cDNA (nucleotides 45 to 1130 of SEQ ID NO: 141) encodes a 362 amino acid transmembrane protein (SEQ ID NO: 142)

[1802] FIG. 219 depicts a hydropathy plot of human INTERCEPT 307.

[1803] The signal peptide prediction program SIGNALP (Nielsen et al., 1997, Protein Engineering 10:1-6) predicted that human INTERCEPT 307 includes a 23 amino acid signal peptide (amino acid 1 to amino acid 23 of SEQ ID NO: 142) preceding the mature INTERCEPT 307 protein (corresponding to amino acid 24 to amino acid 362 of SEQ ID NO: 142). In instances wherein the signal peptide is cleaved, the molecular weight of INTERCEPT 307 protein without post-translational modifications is 40.6 kDa prior to the cleavage of the signal peptide, and 38.1 kDa after cleavage of the signal peptide.

[1804] Human INTERCEPT 307 protein is a transmembrane protein that contains extracellular domains at amino acid residues 24 to 153, 211 to 228, and 319 to 330, transmembrane domains at amino acid residues 154 to 175, 192 to 210, 229 to 252, 296 to 319, and 331 to 348, and cytoplasmic domains at amino acid residues 176 to 191, 253 to 295, and 349 to 362 of SEQ ID NO: 142.

[1805] In instances wherein the signal peptide is not cleaved, a human INTERCEPT 307 protein is a transmembrane protein that contains extracellular domains at amino acid residues 1 to 153, 211 to 228, and 319 to 330, transmembrane domains at amino acid residues 154 to 175, 192 to 210, 229 to 252, 296 to 319, and 331 to 348, and cytoplasmic domains at amino acid residues 176 to 191, 253 to 295, and 349 to 362 of SEQ ID NO: 142.

[1806] Alternatively, in another embodiment, a human INTERCEPT 307 protein contains cytoplasmic domains at amino acid residues 24 to 153, 211 to 228, and 319 to 330, transmembrane domains at amino acid residues 154 to 175, 192 to 210, 229 to 252, 296 to 319, and 331 to 348, and extracellular domains at amino acid residues 176 to 191, 253 to 295, and 349 to 362 of SEQ ID NO: 142.

[1807] In one embodiment a cDNA sequence of human INTERCEPT 307 has a nucleotide at position 54 which is cytosine (C). In this embodiment, the cDNA contains an open reading frame encoding a polypeptide having an amino acid at position 4 that is leucine (L). In an alternative embodiment, a species variant cDNA sequence of human INTERCEPT 307 has a nucleotide at position 54 which is adenine (A). In this embodiment, the cDNA contains an open reading frame encoding a polypeptide having an amino acid at position 4 that is isoleucine (I), i.e., a conservative substitution.

[1808] In another embodiment a cDNA sequence of human INTERCEPT 307 has a nucleotide at position 76 which is thymine (T). In this embodiment, the cDNA contains an open reading frame encoding a polypeptide having an amino acid at position 11 that is phenylalanine (F). In an alternative embodiment, a species variant cDNA sequence of human INTERCEPT 307 has a nucleotide at position 76 which is adenine (A). In this embodiment, the cDNA contains an open reading frame encoding a polypeptide having an amino acid at position 11 that is tyrosine (Y), i.e., a conservative substitution.

[1809] In another embodiment a cDNA sequence of human INTERCEPT 307 has a nucleotide at position 87 which is adenine (A). In this embodiment, the cDNA contains an open reading frame encoding a polypeptide having an amino acid at position 15 that is asparagine (N). In an alternative embodiment, a species variant cDNA sequence of human INTERCEPT 307 has a nucleotide at position 87 which is guanine (G). In this embodiment, the cDNA contains an open reading frame encoding a polypeptide having an amino acid at position 15 that is aspartate (D), i.e., a conservative substitution.

[1810] In another embodiment a cDNA sequence of human INTERCEPT 307 has a nucleotide at position 123 which is thymidine (T). In this embodiment, the cDNA contains an open reading frame encoding a polypeptide having an amino acid at position 27 that is serine (S). In an alternative embodiment, a species variant cDNA sequence of human INTERCEPT 307 has a nucleotide at position 180 which is adenine (A). In this embodiment, the cDNA contains an open reading frame encoding a polypeptide having an amino acid at position 27 that is threonine (T), i.e., a conservative substitution.

[1811] Human INTERCEPT 307 includes a gas vesicle protein GVPc-like domain (at amino acids 112 to 141 of SEQ ID NO: 142).

[1812] Two N-glycosylation sites are present in INTERCEPT 307. The first has the sequence NYSY (at amino acid residues 91 to 94) and second has the sequence NGTT (at amino acid residues 100 to 103). Five protein kinase C phosphorylation sites are present in INTERCEPT 307. The first has the sequence SLR (at amino acid residues 56 to 58), the second has the sequence TTK (at amino acid residues 102 to 104), the third has the sequence SAK (at amino acid residues 124 to 126), the fourth has the sequence SRR (at amino acid residues 147 to 149), and the fifth has the sequence TWK (at amino acid residues 353 to 355). INTERCEPT 307 has three casein kinase II phosphorylation sites. The first has the sequence TTKE (at amino acid residues 102 to 105), the second has the sequence SAKE (at amino acid residues 124 to 127), and the third has the sequence TWKE (at amino acid residues 353 to 356). Eight N-myristylation sites are present in INTERCEPT 307. The first has the sequence GNLFGQ (at amino acid residues 19 to 24), the second has the sequence GAFDSS (at amino acid residues 35 to 40), the third has the sequence GLCPGN (at amino acid residues 95 to 100), the fourth has the sequence GTLNSL (at amino acid residues 169 to 174), the fifth has the sequence GGDMAR (at amino acid residues 180 to 185), the sixth has the sequence GSNAAF (at amino acid residues 278 TO 283), the seventh has the sequence GLVMAL (at amino acid residues 298 to 303), and the eighth has the sequence GSLQND (at amino acid residues 320 to 325). INTERCEPT 307 has a leucine zipper pattern with the sequence LFGLVMALSAVVSLLQFPIFTL at amino acid residues 296 to 317.

[1813] The INTERCEPT 307 gene maps to human chromosome 11 between markers D11S1357 and D11S1765.

[1814] FIG. 220 shows an alignment of the human INTERCEPT 307 amino acid sequence with the prostate cancer gene PB39 amino acid sequence (Accession Number NM_{—}003627). The alignment shows that there is a 21.0% overall amino acid sequence identity between INTERCEPT 307 and PB39. PB39 is expressed in tissues of the adult colon, small intestine, ovary, prostate, spleen, skeletal muscle and pancreas. PB39 is also expressed in fetal kidney, liver and lung. The expression of PB39 has been shown to be increased early in prostate cancer development and PB39 can play a role in the development of human prostate cancer. As such, INTERCEPT 307, nucleic acids and proteins may be useful, for example, as early markers for the development of prostate cancer (e.g., early markers for the development of prostatic intraepithelial neoplasia (PIN)).

[1815] FIGS. 221A-221C shows an alignment of the nucleotide sequence of INTERCEPT 307 coding region and the nucleotide sequence of PB39 coding region (Accession Number AF045584). The alignment shows a 40.9% overall sequence identity between the two nucleotide sequences. The full-length INTERCEPT 307 nucleic acid sequence and PB39 cDNA (Accession Number NM_{—}003627) have an overall sequence identity of 44.0%.

[1816] FIG. 222 shows an alignment of the human INTERCEPT 307 amino acid sequence with the human eosinophil granule major basic protein amino acid sequence (Accession Number Z26248). The alignment shows that there is a 13.8% overall amino acid sequence identity between INTERCEPT 307 and human eosinophil granule major basic protein. Human eosinophil granule major basic protein (MBP) is expressed in eosinophils and has toxic effects on many targets, including helminths, protozoa and bacteria and surrounding cells (Gleich, A. J. et al. (1993) Annu. Rev. Med. 44:85-101). MBP mediates damage to the respiratory epithelium (e.g., desquamation and destruction of sputum ciliated cells) in individuals with asthma, and increased MBP concentration has been shown to be a good marker for asthma (Frigas, E. et al. (1986) J. Allergy Clinical Immunol 77:537-537).

[1817] FIGS. 223A-223B shows an alignment of the nucleotide sequence of INTERCEPT 307 coding region and the nucleotide sequence of human eosinophil granule major basic protein amino acid sequence coding region (Accession Number Z26248). The alignment shows a 38.1% overall sequence identity between the two nucleotide sequences. The full-length INTERCEPT 307 nucleic acid sequence and human eosinophil granule major basic protein cDNA (Accession Number Z26248) have an overall sequence identity of 57.3%.

[1818] Clone INT307, which encodes human INTERCEPT 307, was deposited with the American Type Culture Collection (10801 University Boulevard, Manassas, Va. 20110-2209) on Jul. 29, 1999 and assigned Accession Number PTA-455. This deposit will be maintained under the terms of the Budapest Treaty on the International Recognition of the Deposit of Microorganisms for the Purposes of Patent Procedure. This deposit was made merely as a convenience for those of skill in the art and is not an admission that a deposit is required under 35 U.S.C. §112.

[1819] Uses of INTERCEPT 307 Nucleic Acids. Polypeptides. and Modulators Thereof

[1820] As INTERCEPT 307 was originally found in a human TH2-induced T-cell library, INTERCEPT 307 nucleic acids, proteins, and modulators thereof can be used to modulate the proliferation, development, differentiation, and/or function of lymphocytes, e.g., T-lymphocytes. INTERCEPT 307 nucleic acids, proteins and modulators thereof can be utilized to modulate immune-related processes, e.g., the host immune response by, for example, modulating the formation of and/or binding to immune complexes, detection and defense against surface antigens and bacteria, and immune surveillance for rapid removal or pathogens. Such INTERCEPT 307 compositions and modulators thereof can be utilized, e.g., to ameliorate incidence of any symptoms associated with disorders that involve such immune-related processes, including, but not limited to, viral or bacterial infection, and inflammatory disorders (e.g., bacterial or viral infection, psoriasis, allergies and inflammatory bowel diseases). INTERCEPT 307 nucleic acids, proteins and modulators thereof can be used to modulate or treat immune related disorders, e.g. immunodeficiency disorders (e.g., HIV), viral disorders, cancers, and inflammatory disorders (e.g., bacterial or viral infection, psoriasis, septicemia, arthritis, allergic reactions). INTERCEPT 307 nucleic acids, proteins and modulators thereof can be used to treat atopic conditions, such as asthma and allergy, including allergic rhinitis, gastrointestinal allergies, including food allergies, eosinophilia, conjunctivitis, glomerular nephritis, certain pathogen susceptibilities such as helminthic (e.g., leishmaniasis) and certain viral infections, including HIV, and bacterial infections, including tuberculosis and lepromatous leprosy.

[1821] INTERCEPT 307 exhibits homology to PB39. Therefore, INTERCEPT 307 nucleic acids, proteins and modulators thereof can be utilized to modulate the proliferation, differentiation, and/or function of prostate cells. INTERCEPT 307 nucleic acids, proteins and modulators thereof can be utilized to modulate processes involved in prostate development, differentiation and activity, including, but not limited to development, and differentiation and activation of prostate tissues and cells as well as any function associated with such cells, and amelioration of one or more symptoms associated with abnormal function of such cell types or disorders associated with such cell types. Such disorders can include, but are not limited to, malignant or benign prostate cell growth or inflammatory disorders (e.g., prostatitis, benign prostatic hypertrophy, benign prostatic hyperplasia (BPH), prostatic paraganglioma, prostate adenocarcinoma, prostatic intraepithelial neoplasia, prostato-rectal fistulas, and/or atypical prostatic stromal lesions).

[1822] In further light of the fact that INTERCEPT 307 exhibits homology to PB39 which is expressed by tumor cells, INTERCEPT 307 nucleic acids, proteins and modulators thereof can be utilized to modulate the development and progression of cancerous and non-cancerous cell proliferative disorders, such as deregulated proliferation (such as hyperdysplasia, hyper-IgM syndrome, or lymphoproliferative disorders), cirrhosis of the liver (a condition in which scarring has overtaken normal liver regeneration processes), treatment of keloid (hypertrophic scar) formation (disfiguring of the skin in which the scarring process interferes with normal renewal), psoriasis (a common skin condition characterized by excessive proliferation of the skin and delay in proper cell fate determination), benign tumors, fibrocystic conditions, and tissue hypertrophy (e.g. prostatic hyperplasia), or cancers, such as neoplasms or tumors (such as carcinomas, sarcomas, adenomas or myeloid lymphoma tumors, e.g., fibrosarcoma, myxosarcoma, liposarcoma, chondrosarcoma, osteogenic sarcoma, chordoma, angiosarcoma, endotheliosarcoma, lymphangiosarcoma, lymphangioendotheliosarcoma, synovioma, mesothelioma, Ewing's tumor, leimyosarcoma, rhabdotheliosarcoma, colon sarcoma, pancreatic cancer, breast cancer, ovarian cancer, prostate cancer, squamous cell carcinoma, basal cell carcinoma, adenocarcinoma, sweat gland carcinoma, sebaceous gland carcinoma, papillary carcinoma, papillary adenocarcinomas, cystadenocarcinoma, medullary carcinoma, bronchogenic carcinoma, renal cell carcinoma, hematoma, bile duct carcinoma, melanoma, choriocarcinoma, semicoma, embryonal carcinoma, Wilms' tumor, cervical cancer, testicular tumor, lung carcinoma, small cell carcinoma, bladder carcinoma, epithelial carcinoma, glioma, astrocytoma, medulloblastoma, craniopharyngioma, ependynoma, pinealoma, hemangioblastoma, retinoblastoma), leukemias, (e.g. acute lymphocytic leukemia), acute myelocytic leukemia (myelolastic, promyelocytic, myelomonocytic, monocytic and erythroleukemia), chronic leukemias (chronic myelocytic (granulocytic) leukemia and chronic lymphocytic leukemia), or polycythemia vera, or lymphomas (Hodgkin's disease and non-Hodgkin's diseases), multiple myelomas and Waldenström's macroglobulinemia.

[1823] In particular, INTERCEPT 307 nucleic acids, proteins and modulators thereof can be utilized to modulate the development and progression of prostate cancer, e.g., prostatic intraepithelial neoplasia, pro static paraganglioma, and prostate adenocarcinoma.

[1824] As INTERCEPT 307 has a gas vesicle protein-like domain, INTERCEPT 307 nucleic acids and protein fragments that contain the gas vesicle protein-like domain can be used to produce gas vesicles which can be used for protein, drug, and antigen presentation (e.g., vaccines).

[1825] INTERCEPT 307 has a leucine zipper pattern, therefore, INTERCEPT 307 nucleic acids, proteins and modulators thereof can be used to modulate protein-protein interactions (e.g., stabilize, promote, inhibit or disrupt protein-protein interactions).

[1826] As INTERCEPT 307 has homology to eosinophil granule basic protein, INTERCEPT 307 nucleic acids, proteins and modulators thereof can be used to modulate eosinophil function and activity, e.g., the ability to kill targets such as helminth, protozoa, and bacteria. INTERCEPT 307 nucleic acids, proteins and modulators thereof can be used to treat asthma, allergies (e.g., ocular allergies), nonallergic ophthahnic diseases (e.g., Wegener's granulomatosis, orbital pseudo-tumor and histiocytosis X), and helminth infection. INTERCEPT 307 nucleic acids, proteins and modulators thereof can be used to monitor an individual's asthma condition.

[1827] INTERCEPT 307 expression can be utilized as a marker (e.g., an in situ marker) for specific tissues (e.g., the prostate) and/or cells (e.g., prostatic cells) in which INTERCEPT 307 is expressed. INTERCEPT 307 expression can also be utilized as a marker for the development and/or progression of diseases and disorders such as prostate cancer and asthma. Further, INTERCEPT 307 nucleic acids be utilized for chromosomal mapping, or as chromosomal markers, e.g., in radiation hybrid mapping.

[1828] Human MANGO 511

[1829] A cDNA encoding human MANGO 511 was identified by analyzing the sequences of clones present in a human dendritic cell library for sequences that encode wholly secreted or transmembrane proteins. This analysis led to the identification of a clone, jThxh005c10, encoding full-length human MANGO 511. The human MANGO 511 cDNA of this clone is 1477 nucleotides long (FIGS. 224A-224B; SEQ ID NO: 143). The open reading frame of this cDNA (nucleotides 108 to 1004 of SEQ ID NO: 143) encodes a 299 amino acid transmembrane protein (SEQ ID NO: 144).

[1830] FIG. 225 depicts a hydropathy plot of human MANGO 511.

[1831] The signal peptide prediction program SIGNALP (Nielsen et al., 1997, Protein Engineering 10:1-6) predicted that human MANGO 511 includes a 41 amino acid signal peptide (amino acid 1 to amino acid 41), preceding the mature MANGO 511 protein corresponding to amino acid 42 to amino acid 299. In instances wherein the signal peptide is cleaved, the molecular weight of MANGO 511 protein without post-translational modifications is 32.8 kDa prior to the cleavage of the signal peptide, and 28.6 kDa after cleavage of the signal peptide.

[1832] Human MANGO 511 protein is a transmembrane protein that contains an extracellular domain at amino acid residues 42 to 265, a transmembrane domain at amino acid residues 266 to 284, and a cytoplasmic domain at amino acid residues 285 to 299 of SEQ ID NO: 144.

[1833] In instances wherein the signal peptide is not cleaved, a human MANGO 511 protein is a transmembrane protein that contains an extracellular domain at amino acid residues 1 to 265, a transmembrane domain at amino acid residues 266 to 284, and a cytoplasmic domain at amino acid residues 285 to 299 of SEQ ID NO: 144.

[1834] Alternatively, in another embodiment, a human MANGO 511 protein is a transmembrane protein that contains a cytoplasmic domain at amino acid residues 42 to 265, a transmembrane domain at amino acid residues 266 to 284, and an extracellular domain at amino acid residues 285 to 299 of SEQ ID NO: 144.

[1835] In one embodiment a cDNA sequence of human MANGO 511 has a nucleotide at position 138 which is cytosine (C). In this embodiment, the cDNA contains an open reading frame encoding a polypeptide having an amino acid at position 11 that is leucine (L). In an alternative embodiment, a species variant cDNA sequence of human MANGO 511 has a nucleotide at position 138 which is adenine (A). In this embodiment, the cDNA contains an open reading frame encoding a polypeptide having an amino acid at position 11 that is isoleucine (I), i.e., a conservative substitution.

[1836] In another embodiment a cDNA sequence of human MANGO 511 has a nucleotide at position 156 which is guanine (G). In this embodiment, the cDNA contains an open reading frame encoding a polypeptide having an amino acid at position 17 that is aspartate (D). In an alternative embodiment, a species variant cDNA sequence of human MANGO 511 has a nucleotide at position 156 which is adenine (A). In this embodiment, the cDNA contains an open reading frame encoding a polypeptide having an amino acid at position 17 that is asparagine (N), i.e., a conservative substitution.

[1837] In another embodiment a cDNA sequence of human MANGO 511 has a nucleotide at position 202 which is guanine (G). In this embodiment, the cDNA contains an open reading frame encoding a polypeptide having an amino acid at position 32 that is serine (S). In an alternative embodiment, a species variant cDNA sequence of human MANGO 511 has a nucleotide at position 202 which is cytosine (C). In this embodiment, the cDNA contains an open reading frame encoding a polypeptide having an amino acid at position 32 that is threonine (T), i.e., a conservative substitution.

[1838] In another embodiment a cDNA sequence of human MANGO 511 has a nucleotide at position 214 which is guanine (G). In this embodiment, the cDNA contains an open reading frame encoding a polypeptide having an amino acid at position 36 that is arginine (R). In an alternative embodiment, a species variant cDNA sequence of human MANGO 511 has a nucleotide at position 214 which is adenine (A). In this embodiment, the cDNA contains an open reading frame encoding a polypeptide having an amino acid at position 36 that is lysine (K), i.e., a conservative substitution.

[1839] Human MANGO 511 includes an Ig-like domain at amino acids 60 to 118 of SEQ ID NO: 144.

[1840] Human MANGO 511 has three N-glycosylation sites. The first has the sequence NLSK (at amino acid residues 43 to 46), the second has the sequence NVTL (at amino acid residues 157 to 160), and the third has the sequence NKSD (at amino acid residues 248 to 251). Four protein kinase C phosphorylation sites are present in MANGO 511. The first has the sequence TIR (at amino acid residues 64 to 66), the second has the sequence SHR (at amino acid residues 207 to 209), the third has the sequence SRR (at amino acid residues 217 to 219), and the fourth has the sequence SQR (at amino acid residues 289 to 291). MANGO 511 has three casein II kinase phosphorylation sites. The first has the sequence SMTE (at amino acid residues 105 to 108) and the second has the sequence TSGE (at amino acid residues 153 to 156). Five N-myristylation sites are present in MANGO 511. The first has the sequence GSVISR (at amino acid residues 54 to 59), the second has the sequence GNSVTI (at amino acid residues 60 to 65), the third has the sequence GTLEAQ (at amino acid residues 69 to 74), the fourth has the sequence GQFQAL (at amino acid residues 193 to 198), and the fifth has the sequence GAADNL (at amino acid residues 238 to 243)

[1841] FIG. 226 shows a local alignment of the human MANGO 511 amino acid sequence with the leukocyte Ig-like receptor-1 (LIR-1) amino acid sequence (Accession Number AAB63522). The alignment shows that there is a 59.2% local identity over the 233 amino acids that were compared from the sequences of MANGO 511 and LIR-1.

[1842] LIR-1 is a expressed by lymphocytes, natural killer cells, monocytes, and dendritic cells and has been shown to be a major histocompatibility complex (MHC) class I binding protein (Cosman et al. (1997) Immunity 7:273-282). LIR-1 can function as a broad HLA class I-specific inhibitory receptor that recognizes different alleles coded for by different HLA loci (Vitale et al. (1999) Int. Immunol. 11:29-35). The tyrosine phosphorylation of LIR-1 in monocytes has been shown to result in the binding of tyrosine phosphatase SHP-1, and LIR-1 has been shown to be involved in the inhibition or down-modulation of monocyte activation signals (Fanger et al. (1998) Eur. J. Immunol. 28:3423-3434). As such MANGO 511 nucleic acids, proteins and modulators thereof are useful in modulating MHC class I binding and monocyte activation.

[1843] FIGS. 227A-227C shows an alignment of the coding regions of the nucleotide sequence of LIR-1 (Accession Number AF009221) and the nucleotide sequence of human MANGO 511. The alignment shows a 34.0% overall sequence identity between the two nucleotide sequences. The coding region of the nucleotide sequence of LIR-1 (Accession Number AF009221) and the full-length nucleotide sequence of human MANGO 511 cDNA have an overall sequence identity of 44.0%.

[1844] Clone EpM511, which encodes human MANGO 511, was deposited with the American Type Culture Collection (10801 University Boulevard, Manassas, Va. 20110-2209) on Jul. 23, 1999 and assigned Accession Number PTA-425. This deposit will be maintained under the terms of the Budapest Treaty on the International Recognition of the Deposit of Microorganisms for the Purposes of Patent Procedure. This deposit was made merely as a convenience for those of skill in the art and is not an admission that a deposit is required under 35 U.S.C. §112.

[1845] Uses of MANGO 511 Nucleic Acids Polypeptides, and Modulators Thereof

[1846] As MANGO 511 was originally found in a dendritic cell library, and including one or more Ig-like domains, MANGO 511 nucleic acids, proteins, and modulators thereof can be used to modulate the proliferation, development, differentiation, and/or function of immune cells, e.g. B-cells, dendritic cells, natural killer cells and monocytes, and/or immune function. MANGO 511 nucleic acids, proteins and modulators thereof can be utilized to modulate immunoglobulins and formation of antibodies, and immune-related processes, e.g., the host immune response by, for example, modulating the formation of and/or binding to immune complexes, detection and defense against surface antigens and bacteria, and immune surveillance for rapid removal or pathogens. Such MANGO 511 compositions and modulators thereof can be utilized modulate or treat immune disorders that include, but are not limited to, immune proliferative disorders (e.g., carcinoma, lymphoma, e.g., follicular lymphoma), and disorders associated with fighting pathogenic infections, e.g., bacterial (e.g., chlamydia) infection, parasitic infection, and viral infection (e.g., HSV or HIV infection), and pathogenic disorders associated with immune disorders (e.g., immunodeficiency disorders, such as HIV), autoimmune disorders, such as arthritis, graft rejection (e.g., allograft rejection), multiple sclerosis, Grave's disease, or Hashimoto's disease, T cell disorders (e.g., AIDS) and inflammatory disorders, such as septicemia, cerebral malaria, inflammatory bowel disease, arthritis (e.g., rheumatoid arthritis, osteoarthritis), and allergic inflammatory disorders (e.g., asthma, psoriasis), apoptotic disorders (e.g., rheumatoid arthritis, systemic lupus erythematosus, insulin-dependent diabetes mellitus), cytotoxic disorders, septic shock, and cachexia.

[1847] MANGO 511 nucleic acids, proteins, and modulators thereof can also be used to modulate leukocyte trafficking, cancer, Type I immunologic disorders, e.g., anaphylaxis and/or rhinitis, by, for example, modulating the interaction between antigens and cell receptors, e.g., high affinity IgE receptors.

[1848] As MANGO 511 exhibits homology to leukocyte Ig-like receptor-1 (LIR-1), MANGO 511 nucleic acids, proteins and modulators thereof can be used modulate MHC class I binding. For example, MANGO 511 nucleic acids, proteins and modulators thereof can be used to modulate or treat disorders associated with aberrant MHC class I binding, such as autoimmune disorders, bacterial infections and viral infections. MANGO 511 nucleic acids, proteins and modulators thereof can be used to modulate monocyte activation signals and may be used to inhibit unwanted bystander responses mediated by antigen-specific T-cells. For example, antagonists of MANGO 511 action, such as peptides, antibodies or small molecules, that decrease or prevent MANGO 511 signaling can be used as modulators of monocyte activation. MANGO 511 nucleic acids, proteins and modulators thereof can be used to modulate or treat disorders associated with aberrant monocyte activation including, but not limited to, Wegener's granulomatosis (WG), hemophagocytic lymphohistiocytosis (HLH), histiocytic medullary reticulosis (HM), sarcoidosis, polyneuropathy, organomegaly, endocrinopathy, M protein, skin changes (POMEMS) syndrome, and systemic sclerosis (Ssc).

[1849] As MANGO 511 exhibits homology to LIR-1, MANGO 511 nucleic acids, proteins and/or modulators thereof can be used to modulate natural killer cell function, e.g., activation. MANGO 511 nucleic acids, proteins and modulators thereof can be used to treat diseases associated with aberrant natural killer cell activation such as chronic natural killer cell lymphocytosis, aggressive non-T, non-B natural killer cell lymphoma/leukemia (ANKL/L), and Chediak-Higashi syndrome.

[1850] MANGO 511 expression can be utilized as a marker (e.g., an in situ marker) for specific tissues (e.g., the spleen) and/or cells (e.g., immune cells such as dendritic cells and natural killer cells) in which MANGO 511 is expressed. MANGO 511 nucleic acids can also be utilized for chromosomal mapping, or as chromosomal markers, e.g., in radiation hybrid mapping.

[1851] Human TANGO 361

[1852] A cDNA encoding human TANGO 361 was identified by analyzing the sequences of clones present in a prostate epithelium library for sequences that encode wholly secreted or transmembrane proteins. This analysis led to the identification of a clone, jthqb014c05, encoding full-length human TANGO 361. The human TANGO 361 cDNA of this clone is 5058 nucleotides long (FIGS. 228A-228C; SEQ ID NO: 145). The open reading frame of this cDNA (nucleotides 41 to 1309 of SEQ ID NO: 145) encodes a 423 amino acid transmembrane protein (SEQ ID NO: 146).

[1853] FIG. 229 depicts a hydropathy plot of human TANGO 361.

[1854] The signal peptide prediction program SIGNALP (Nielsen et al., 1997, Protein Engineering 10:1-6) predicted that human TANGO 361 includes a 35 amino acid signal peptide (amino acid 1 to amino acid 35 of SEQ ID NO: 146) preceding the mature TANGO 361 protein (corresponding to amino acid 36 to amino acid 423 of SEQ ID NO: 146). In instances wherein the signal peptide is cleaved, the molecular weight of TANGO 361 protein without post-ranslational modifications is 47.7 kDa prior to the cleavage of the signal peptide, and 43.6 kDa after cleavage of the signal peptide.

[1855] Human TANGO 361 protein is a transmembrane protein that contains an extracellular domain at amino acid residues 235 to 423, a transmembrane domain at amino acid residues 217 to 234, and a cytoplasmic domain at amino acid residues 36 to 216 of SEQ ID NO: 146.

[1856] In instances wherein the signal peptide is not cleaved, human TANGO 361 contains an extracellular domain at amino acid residues 235 to 423, a transmembrane domain at amino acid residues 217 to 234, and a cytoplasmic domain at amino acid residues 1 to 216 of SEQ ID NO: 146.

[1857] Alternatively, in another embodiment, a human TANGO 361 protein contains a cytoplasmic domain at amino acid residues 235 to 423, a transmembrane domain at amino acid residues 217 to 234, and an extracellular domain at amino acid residues 36 to 216 of SEQ ID NO: 146.

[1858] In one embodiment a cDNA sequence of human TANGO 361 has a nucleotide at position 63 which is thymine (T). In this embodiment, the cDNA contains an open reading frame encoding a polypeptide having an amino acid at position 8 that is valine (V). In an alternative embodiment, a species variant cDNA sequence of human TANGO 361 has a nucleotide at position 63 which is cytosine (C). In this embodiment, the cDNA contains an open reading frame encoding a polypeptide having an amino acid at position 8 that is alanine (A), i.e., a conservative substitution.

[1859] In another embodiment a cDNA sequence of human TANGO 361 has a nucleotide at position 66 which is guanine (G). In this embodiment, the cDNA contains an open reading frame encoding a polypeptide having an amino acid at position 9 that is arginine (R). In an alternative embodiment, a species variant cDNA sequence of human TANGO 361 has a nucleotide at position 66 which is adenine (A). In this embodiment, the cDNA contains an open reading frame encoding a polypeptide having an amino acid at position 9 that is lysine (K), i.e., a conservative substitution.

[1860] In another embodiment a cDNA sequence of human TANGO 361 has a nucleotide at position 117 is thymine (T). In this embodiment, the cDNA contains an open reading frame encoding a polypeptide having an amino acid at position 15 that is phenylalanine (F). In an alternative embodiment, a species variant cDNA sequence of human TANGO 361 has a nucleotide at position 117 which is adenine (a). In this embodiment, the cDNA contains an open reading frame encoding a polypeptide having an amino acid at position 26 that is tyrosine (Y), i.e., a conservative substitution.

[1861] In another embodiment a cDNA sequence of human TANGO 361 has a nucleotide at position 122 is thymidine (T). In this embodiment, the cDNA contains an open reading frame encoding a polypeptide having an amino acid at position 28 that is serine (S). In an alternative embodiment, a species variant cDNA sequence of human TANGO 361 has a nucleotide at position 122 which is adenine (A). In this embodiment, the cDNA contains an open reading frame encoding a polypeptide having an amino acid at position 28 that is threonine (T), i.e., a conservative substitution.

[1862] Human TANGO 361 includes a serine protease domain at amino acids 192 to 417 of SEQ ID NO: 146.

[1863] TANGO 361 has three N-glycosylation sites with the first sequence NFTE at amino acid residues 75 to 78, the second sequence NKTE at amino acid residues 166 to 169, NATW at amino acid residues 223 to 226.

[1864] Ten protein kinase C phosphorylation sites are present in TANGO 361. The first has the sequence TDK (at amino acid residues 61 to 63, the second has the sequence SQR (at amino acid residues 80 to 82, the third has the sequence SVK (at amino acid residues 159 to 161, the fourth has the sequence TRR (at amino acid residues 180 to 182, the fifth has the sequence SLR (at amino acid residues 189 to 191, the sixth has the sequence SHR (at amino acid residues 214 to 216, the seventh has the sequence TYK (at amino acid residues 236 to 238, the eighth has the sequence TIK (at amino acid residues 250 to 252, the ninth has the sequence TPR (at amino acid residues 353 to 355, and the tenth has the sequence TSK (at amino acid residues 418 to 420.

[1865] TANGO 361 has seven casein kinase II phosphorylation sites. The first has the sequence STED (at amino acid residues 127 to 130, the second has the sequence TETD (at amino acid residues 168 to 171, the third has the sequence TEVE (at amino acid residues 196 to 199, the fourth has the sequence SLAE (at amino acid residues 279 to 282, the fifth has the sequence TLID (at amino acid residues 335 to 338, the sixth has the sequence TCNE (at amino acid residues 341 to 344, and the seventh has the sequence SWGD (at amino acid residues 393 to 396.

[1866] Four N-myristylation sites are present in TANGO 361. The first has the sequence GTRRSK (at amino acid residues 179 to 184, the second has the sequence GSHRCG (at amino acid residues 213 to 218), the third has the sequence GALKND (at amino acid residues 317 to 322), and the fourth has the sequence GSLEGK (at amino acid residues 360 to 365).

[1867] TANGO 361 has a ATP/GTP binding site motif with the sequence AGSLEGKT (at amino acid residues 359 to 366). TANGO 361 has a serine protease, histidine active site, consensus sequence with the sequence VSAAHC (at amino acid residues 228 to 233).

[1868] TANGO 361 has a serine protease, serine active site, consensus sequence with the sequence GDSGG (at amino acid residues 371 to 375).

[1869] Clone EpT361, which encodes TANGO 361, was deposited with the American Type Culture Collection (10801 University Boulevard, Manassas, Va. 20110-2209) on Jul. 29, 1999 and assigned Accession Number PTA-438. This deposit will be maintained under the terms of the Budapest Treaty on the International Recognition of the Deposit of Microorganisms for the Purposes of Patent Procedure. This deposit was made merely as a convenience for those of skill in the art and is not an admission that a deposit is required under 35 U.S.C. §112.

[1870] Uses of TANGO 361 Nucleic Acids, Polypeptides and Modulators Thereof

[1871] As TANGO 361 was originally found in a prostate epithelium library, TANGO 361 nucleic acids, proteins, and modulators thereof can be used to modulate the proliferation, differentiation, and/or function of prostate cells and tissues, and to ameliorate of one or more symptoms associated with abnormal function of such cells or tissues or disorders associated with such cells or tissues. Such disorders can include, but are not limited to, malignant or benign prostate cell growth or inflammatory disorders (e.g., prostatitis, benign prostatic hypertrophy, benign prostatic hyperplasia (BPH), prostatic paraganglioma, prostate adenocarcinoma, prostatic intraepithelial neoplasia, prostato-rectal fistulas, atypical prostatic stromal lesions).

[1872] TANGO 361 has structural homology with serine proteases. As such TANGO 361 nucleic acids, proteins and modulators thereof can be utilized to modulate activities, processes or disorders associated with protease activity, e.g., serine protease activity. For example, TANGO 361 nucleic acids, proteins or modulators thereof can be used to modulate serine protease activities, such as those activities associated with such serine proteases (or, where appropriate, human homologs thereof), e.g., adipsin (complement factor D), acrosin, thrombin, plasminogen, protein C, cathepsin G, chymotrypsin, complement components and signaling, cytotoxic cell proteases, duodenase I, elastases 1, 2, 3A, 3B and medullasin, enterokinase, hepatocyte growth factor activator, hepsin, kallikreins, gamma-renin, prostate specific antigen, mast cell proteases, myeloblastin, Alzheimer's plaque-related proteases, tryptases, ancrod, batroxobin, cerastobin, flavoxobin, apolipoprotein, blood fluke cercarial protease, Drosophila trypsin like protease (e.g., alpha, easter, and snake locus), Drosophila protease stubble, or major mite fecal antigen.

[1873] TANGO 361 nucleic acids, proteins and modulators thereof can be used to modulate processes and/or diseases involved with serine protease response activity. For example, such processes and/or diseases can include, but are not limited to cellular activation, cellular proliferation, motility and differentiation, the alternative complement pathway, e.g., disturbances of the complement regulation system, such as complement regulator deficiencies, which include, for example, hereditary angioedema (an allergic disorder) and proxysmal nocturnal hemoglobinuria (the presence of hemoglobin in the urine), modulate body weight or body weight disorders, e.g., obesity or cachexia, systemic energy balance and diabetes.

[1874] TANGO 361 nucleic acids, proteins and modulators thereof can also be used to modulate immune related diseases and disorders, such disorders can include, e.g., autoimmune disorders (e.g., arthritis, graft rejection (e.g., allograft rejection), and T cell autoimmune disorders (e.g., AIDS) and inflammatory disorders (e.g., bacterial infection, psoriasis, septicemia, cerebral malaria, inflammatory bowel disease, multiple sclerosis, arthritis (e.g., rheumatoid arthritis, osteoarthritis), and allergic inflammatory disorders (e.g., asthma, psoriasis).

[1875] TANGO 361 nucleic acids, proteins, and modulators thereof can also be used to rid the body of invading or infecting agents, e.g., bacteria, viruses, parasites, neoplastic cells, cellular platelet function, e.g., activation. Antagonists of TANGO 361 nucleic acids, proteins and modulators thereof, such as peptides, antibodies or small molecules that decrease or block TANGO 361 action, can be used as platelet antagonists, e.g., activation and aggregation blockers. In another example, agonists that mimic TANGO 361 activity, such as peptides, antibodies or small molecules, can be used to induce platelet function, e.g., activation and aggregation. TANGO 361 nucleic acids, proteins and modulators thereof can be utilized to modulate platelet-related processes and disorders, e.g., Glanzmann's thromboasthemia, which is a bleeding disorder characterized by failure of platelet aggregation in response to cell stimuli, and hereditary hemophilia. TANGO 361 nucleic acids, proteins and modulators thereof can be used to modulate formation of Alzheimer's plaques, treatment of Alzheimer's disease, treatment of Fanconi's anemia (FA), and symptoms associated with FA (e.g., bone marrow failure, aplastic anemia, infection, fatigue and/or spontaneous hemorrhage or bleeding).

[1876] TANGO 361 expression can be utilized as a marker (e.g., an in situ marker) for specific tissues (e.g., the prostate) and/or cells (e.g., prostatic cells) in which TANGO 361 is expressed. TANGO 361 nucleic acids can also be utilized for chromosomal mapping, or as chromosomal markers, e.g., in radiation hybrid mapping.

[1877] Human TANGO 499 form 1, Variant 1

[1878] A cDNA encoding human TANGO 499 was identified by analyzing the sequences of clones present in a human pituitary library for sequences that encode wholly secreted or transmembrane proteins. This analysis led to the identification of a clone, jthbb123c10, encoding human TANGO 499. This form of human TANGO 499 is referred to herein as human TANGO 499 form 1, variant 1. The human TANGO 499 form 1, variant 1 cDNA of this clone is 1106 nucleotides long (FIG. 230; SEQ ID NO: 147).

[1879] In one embodiment, the open reading frame of a TANGO 499 cDNA is nucleotides 83 to 844, and encodes a human TANGO 499, form 1, variant 1 polypeptide comprising a 254 amino acid polypeptide (FIG. 230).

[1880] FIG. 231 depicts a hydropathy plot of human TANGO 499 form 1, variant 1.

[1881] The signal peptide prediction program SIGNALP (Nielsen et al., 1997, Protein Engineering 10:1-6) predicted that human TANGO 499 form 1, variant 1 includes a 30 amino acid signal peptide (amino acid 1 to amino acid 30 of SEQ ID NO: 148) preceding the mature TANGO 499 form 1, variant 1 protein (corresponding to amino acid 31 to amino acid 254 of SEQ ID NO: 148). In instances wherein the signal peptide is cleaved, the molecular weight of TANGO 499 form 1, variant 1 protein without post-translational modifications is 27.2 kDa prior to the cleavage of the signal peptide, and 23.8 kDa after cleavage of the signal peptide, thus TANGO 499 form 1, variant 1 polypeptides can be secreted and contain a sequence of amino acids 31 to 254 of SEQ ID NO: 148.

[1882] In instances wherein the signal peptide is not cleaved, human TANGO 499 form 1, variant 1 is a secreted protein having amino acids 1 to 254 of SEQ ID NO: 148.

[1883] In one embodiment a cDNA sequence of human TANGO 499 form 1, variant 1 has a nucleotide at position 134 which is cytosine (C). In this embodiment, the cDNA contains an open reading frame encoding a polypeptide having an amino acid at position 18 that is leucine (L). In an alternative embodiment, a species variant cDNA sequence of human TANGO 499 form 1, variant 1 has a nucleotide at position 134 which is guanine (G). In this embodiment, the cDNA contains an open reading frame encoding a polypeptide having an amino acid at position 18 that is valine (I), i.e., a conservative substitution.

[1884] In another embodiment a cDNA sequence of human TANGO 499 form 1, variant 1 has a nucleotide at position 137 which is adenine (A). In this embodiment, the cDNA contains an open reading frame encoding a polypeptide having an amino acid at position 19 that is threonine (T). In an alternative embodiment, a species variant cDNA sequence of human TANGO 499 form 1, variant 1 has a nucleotide at position 137 which is thymine (T). In this embodiment, the cDNA contains an open reading frame encoding a polypeptide having an amino acid at position 19 that is serine (S), i.e., a conservative substitution.

[1885] In another embodiment a cDNA sequence of human TANGO 499 form 1, variant 1 has a nucleotide at position 192 which is guanine (G). In this embodiment, the cDNA contains an open reading frame encoding a polypeptide having an amino acid at position 37 that is arginine (R). In an alternative embodiment, a species variant cDNA sequence of human TANGO 499 form 1, variant 1 has a nucleotide at position 192 which is adenine (A). In this embodiment, the cDNA contains an open reading frame encoding a polypeptide having an amino acid at position 37 that is lysine (K), i.e., a conservative substitution.

[1886] In another embodiment a cDNA sequence of human TANGO 499 form 1, variant 1 has a nucleotide at position 197 which is cytosine (C). In this embodiment, the cDNA contains an open reading frame encoding a polypeptide having an amino acid at position 39 that is glutamine (Q). In an alternative embodiment, a species variant cDNA sequence of human TANGO 499 form 1, variant 1 has a nucleotide at position 197 which is guanine (G). In this embodiment, the cDNA contains an open reading frame encoding a polypeptide having an amino acid at position 39 that is glutamate (E), i.e., a conservative substitution.

[1887] TANGO 499 form 1, variant 1 has an N-glycosylation site with the sequence NISI (at amino acid residues 95 to 98). Three glycosaminoglycan attachments sites are present in TANGO 499 form 1, variant 1. The first has the sequence SGPG (at amino acid residues 95 to 98), the second has the sequence SGSG (at amino acid residues 244 to 247), and the third has the sequence SGSG (at amino acid residues 248 to 251).

[1888] Three protein kinase C phosphorylation sites are present in TANGO 499 form 1, variant 1. The first has the sequence SEK (at amino acid residues 165 to 167), and the second has the sequence SRR (at amino acid residues 228 to 230), and the third has the sequence SPR (at amino acid residues 233 to 235). TANGO 499 form 1, variant 1 has four casein kinase II phosphorylation sites. The first has the sequence SEMD (at amino acid residues 87 to 90), the second has the sequence SFLE (at amino acid residues 113 to 116), the third has the sequence TFAD (at amino acid residues 180 to 183), and the fourth has the sequence SILD (at amino acid residues 237 to 240).

[1889] Six N-myristylation sites are present in TANGO 499 form 1, variant 1. The first has the sequence GVRQAQ (at amino acid residues 132 to 137), the second has the sequence GCEPSC (at amino acid residues 169 to 174), the third has the sequence GQTFAD (at amino acid residues 178 to 183), the fourth has the sequence GTDLCR (at amino acid residues 184 to 189), the fifth has the sequence GARHCF (at amino acid residues 202 to 207, and the sixth has the sequence GSGSGS (at amino acid residues 243 to 248).

[1890] TANGO 499 form 1, variant 1 has an amidation site with the sequence PGRR (at amino acid residues 219 to 222).

[1891] FIG. 232 shows an alignment of the human TANGO 499 form 1, variant 1 with the Artemin amino acid sequence. The alignment shows that there is a 23.5% overall amino acid sequence identity between TANGO 499 form 1, variant 1 and Artemin. The Artemin protein is widely expressed in the nervous system that has been shown to be involved in such processes as peripheral neuron survival and also dopaminergic midbrain neuron survival.

[1892] Human TANGO 499 form 1, variant 1 contains Glial cell line-derived neurotrophic factor (GDNF) and riboflavin binding protein homology. FIG. 233 shows an alignment of the nucleotide sequence of Riboflavin binding protein and the amino acid sequence of TANGO 499 form 1, variant 1. The alignment shows a 44.5% overall sequence identity between the two nucleotide sequences. The Riboflavin binding protein is expressed in germinal tissues and is involved in the development and maturation of the embryo.

[1893] Clone EpT499, which encodes TANGO 499 form 1, variant 1, was deposited with the American Type Culture Collection (10801 University Boulevard, Manassas, Va. 20110-2209) on Aug. 5, 1999 and assigned Accession Number PTA-455. This deposit will be maintained under the terms of the Budapest Treaty on the International Recognition of the Deposit of Microorganisms for the Purposes of Patent Procedure. This deposit was made merely as a convenience for those of skill in the art and is not an admission that a deposit is required under 35 U.S.C. §112.

[1894] Human TANGO 499 form 2. Variant 3

[1895] A cDNA encoding human an additional form of TANGO 499 was identified by analyzing the sequences of clones present in a retina library for sequences that encode wholly secreted or transmembrane proteins. This analysis led to the identification of a clone, AthX435e8, encoding human TANGO 499. This sequence is referred to herein as form 2, variant 3. The human TANGO 499 form 2, variant 3 cDNA of this clone is 1085 nucleotides long (FIG. 234; SEQ ID NO: 149).

[1896] In one embodiment, the open reading frame of this cDNA is from nucleotides 144 to 8301 and encodes a 229 amino acid secreted protein (SEQ ID NO: 150).

[1897] FIG. 235 depicts a hydropathy plot of human TANGO 499 form 2, variant 3.

[1898] The signal peptide prediction program SIGNALP (Nielsen et al., 1997, Protein Engineering 10:1-6) predicted that human TANGO 499 form 2, variant 3 includes a 30 amino acid signal peptide (amino acid 1 to amino acid 30 of SEQ ID NO: 150) preceding the mature TANGO 499 form 2, variant 3 protein (corresponding to amino acid 31 to amino acid 229 of SEQ ID NO: 150). In instances wherein the signal peptide is cleaved, the molecular weight of TANGO 499 form 2, variant 3 protein without post-translational modifications is 24.6 kDa prior to the cleavage of the signal peptide, and 21.2 kDa after cleavage of the signal peptide, thus TANGO 499 form 2, variant 3 polypeptides can be secreted and contain a sequence of amino acids 31 to 229 of SEQ ID NO: 150.

[1899] TANGO 499 form 2, variant 3 has an N-glycosylation site with the sequence NISI (at amino acid residues 95 to 98).

[1900] Three glycosaminoglycan attachments sites are present in TANGO 499 form 2, variant 3. The first has the sequence SGPG (at amino acid residues 70 to 73), the second has the sequence SGSG (at amino acid residues 219 to 222), and the third has the sequence SGSG (at amino acid residues 223 to 246).

[1901] Three protein kinase C phosphorylation sites are present in TANGO 499 form 2, variant 3. The first has the sequence SEK (at amino acid residues 140 to 152), and the second has the sequence SRR (at amino acid residues 203 to 205), and the third has the sequence SPR (at amino acid residues 208 to 210). TANGO 499 form 2, variant 3 has four casein kinase II phosphorylation sites. The first has the sequence SEMD (at amino acid residues 62 to 65), the second has the sequence SFLE (at amino acid residues 88 to 91), the third has the sequence TFAD (at amino acid residues 155 to 158), and the fourth has the sequence SILD (at amino acid residues 212 to 215).

[1902] Six N-myristylation sites are present in TANGO 499 form 2, variant 3. The first has the sequence GVRQAQ (at amino acid residues 107 to 112), the second has the sequence GCEPSC (at amino acid residues 144 to 149, the third has the sequence GQTFAD (at amino acid residues 153 to 158), the fourth has the sequence GTDLCR (at amino acid residues 159 to 164), the fifth has the sequence GARHCF (at amino acid residues 177 to 182), and the sixth has the sequence GSGSGS (at amino acid residues 218 to 223).

[1903] TANGO 499 form 2, variant 3 has an amidation site with the sequence PGRR (at amino acid residues 194 to 197).

[1904] Human TANGO 499 form 2, variant 3 includes Glial cell line-derived neurotrophic factor (GDNF) and riboflavin binding protein homology. The Riboflavin binding protein is expressed in germinal tissues and is involved in the development and maturation of the embryo. Loss of expression of the riboflavin binding protein results in the failure of the embryo to develop.

[1905] FIG. 236 depicts an alignment of TANGO 499 form 1, variant 1 amino acid sequence and TANGO 499 form 2, variant 3 amino acid sequence. The amino acid sequences are 90.2% identical, the cDNAs are 85.6% identical, and the ORFs are 90.2% identical. The alignment clearly demonstrates that the two forms are identical except for the result of a putative alternative exon splicing event in the illustrated region. The invention contemplates additional splice variants of the presently claimed nucleic acids and proteins encoded by such splice variants.

[1906] Clone EpT499, which encodes TANGO 499 form 2, variant 3, was deposited with the American Type Culture Collection (10801 University Boulevard, Manassas, Va. 20110-2209) on Aug. 5, 1999 and assigned Accession Number PTA-454. This deposit will be maintained under the terms of the Budapest Treaty on the International Recognition of the Deposit of Microorganisms for the Purposes of Patent Procedure. This deposit was made merely as a convenience for those of skill in the art and is not an admission that a deposit is required under 35 U.S.C. §112.

[1907] Additional Human TANGO 499 Variants

[1908] Analysis of multiple individual human TANGO 499 clones revealed a complex set of variant transcripts (e.g., alternatively spliced transcripts). One such alternatively spliced form of a human TANGO 499 gene is referred to as a human TANGO 499 form 1, variant 1, which is also described in detail above. Another such alternatively spliced form of a human TANGO 499 gene is referred to as a human TANGO 499 form 2, variant 3, which is described in detail above. Additional human TANGO 499 form 1 and form 2 variants have been identified and are described below.

[1909] In one embodiment, the open reading frame of the form 1 TANGO 499 cDNA conserved region comprises nucleotides 1 to 783 of the TANGO 499 open reading frame.

[1910] In another embodiment, the open reading frame of the form 2 TANGO 499 cDNA conserved region comprises nucleotides 1 to 708 of the TANGO 499 open reading frame.

[1911] In another embodiment, the open reading frame of a TANGO 499 cDNA comprises nucleotides 26 to 847 of the TANGO 499 open reading frame and encodes a polypeptide referred to herein as form 2, variant 1.

[1912] In another embodiment, the open reading frame of a TANGO 499 cDNA comprises nucleotides 11 to 794, and encodes a polypeptide comprising the sequence of the TANGO 499 open reading frame referred to herein as form 1, variant 2.

[1913] In another embodiment, the open reading frame of this cDNA comprises nucleotides 11 to 719, and encodes a polypeptide comprising the sequence of the TANGO 499 open reading frame referred to herein as form 2, variant 2.

[1914] In another embodiment, the open reading frame of a TANGO 499 cDNA comprises nucleotides 447 to 1230, and encodes a polypeptide comprising the sequence of the TANGO 499 open reading frame referred to herein as form 1, variant 3.

[1915] In another embodiment, the open reading frame of this cDNA comprises nucleotides 95 to 908, and encodes a polypeptide comprising the sequence of the TANGO 499 open reading frame referred to herein as form 1, variant 4.

[1916] In another embodiment, the open reading frame of this TANGO 499 comprises nucleotides 95 to 833, and encodes a polypeptide comprising the sequence of the TANGO 499 open reading frame referred to herein as form 2, variant 4.

[1917] Uses of TANGO 499 Nucleic Acids, Polypeptides, and Modulators Thereof

[1918] As TANGO 499 was originally found in a human pituitary library, TANGO 499 nucleic acids, proteins, and modulators thereof can be used to modulate the proliferation, development, differentiation, and/or function of cells, tissues and/or organs, e.g., the proliferation of tissues and cells of pituitary origin.

[1919] Thus, as TANGO 499 was originally identified in a pituitary library, for example, TANGO 499 nucleic acids, proteins and modulators thereof can be used to regulate processes involved with sexual development and function, including, e.g., normal and abnormal reproductive hormonal function in the fetus, infant, adolescent and adult and also can modulate the effects of pituitary insufficiency and pituitary adenomas on sexual development, reproductive function and sexuality in men and women. Furthermore, TANGO 499 nucleic acids, proteins and modulators thereof can be used to treat pituitary tumors causing Cushing's syndrome, and also hypopituitarism during pregnancy which may be the result of intrasellar adenomas, suprasellar lesions, lymphocytic hypophysitis or antepartum pituitary necrosis, and in the postpartum period may be because of postpartum hemorrhage and pituitary necrosis. TANGO 499 nucleic acids, proteins and modulators thereof can also be used to treat posterior pituitary problems in pregnancy manifested by diabetes insipidus, with a pregnancy-specific variety resulting from excessive degradation of arginine vasopressin by placental vasopressinase. Further, TANGO 499 nucleic acids, proteins and modulators thereof can be used to treat pituitary-related disorders, e.g., hormone secretion disorders, (e.g., Cushing's disease, hyperprolactinemia, acromegaly-gigantism, and precocious and delayed puberty).

[1920] In light of the fact that TANGO 499 was identified in a retina library, TANGO 499 nucleic acids, proteins and modulators thereof can be utilized to modulate the development and function of the eye, such as retinal development and function, (e.g., photoreceptor disk morphogenesis). TANGO 499 nucleic acids, proteins and modulators thereof can be utilized to treat eye diseases and/or disorders, e.g., autosomal dominant retinitis pigmentosa, autosomal dominant punctata albescens, butterfly-shaped pigment dystrophy, cataracts, macular degeneration, myopia, stigmatism and retinoblastoma.

[1921] TANGO 499 family members have homology to glial cell line-derived neurotrophic-related factors (e.g., GDNF, artemin, neurturin, and persephin). Thus, TANGO 499 nucleic acids, proteins and modulators thereof can be utilized to modulate survival, activation, proliferation, motility, and differentiation of peripheral or central neurons.

[1922] TANGO 499 nucleic acids, proteins and modulators thereof can be used to modulate kidney development or for gene therapy for modulating defects in kidney organogenesis. As such, TANGO 499 nucleic acids, proteins and modulators thereof can also be used to modulate renal disorders, e.g., glomerular disease, (e.g., acute and chronic glomerulonephritis), tubular diseases, and tubulo-interstitial diseases.

[1923] TANGO 499 nucleic acids, proteins and modulators thereof can also be used to modulate intercellular signaling in the nervous system, to modulate disorders associated with aberrant signal transduction in response to neurotrophic factors and cell surface receptors such as, e.g., other GDNF proteins, and to modulate myelin-associated processes. For example, TANGO nucleic acids, proteins and modulators thereof can be used to maintain the myelin sheath e.g., enhance myelin membrane adhesion to extracellular matrices during development, e.g., at late stages of development.

[1924] Furthermore, TANGO 499 nucleic acids, proteins, and modulators thereof can be used to modulate the proliferation, development, differentiation, and/or function of neural organs, e.g., neural tissues and cells, e.g., cells of the central nervous system, e.g. cells of the peripheral nervous system. TANGO 499 nucleic acids, proteins, and modulators thereof can also be used to modulate symptoms associated with abnormal neural signaling and function, e.g., epilepsy, stroke, traumatic injury. In particular, TANGO 499 proteins could be useful to treat neural related disorders or neural damage, such as for regenerative neural repair after damage by trauma, degeneration, or inflammation e.g., spinal cord injuries, infarction, infection, malignancy, exposure to toxic agents, nutritional deficiency, paraneo-plastic syndromes, and degenerative nerve diseases including but not limited to Alzheimer's disease, Parkinson's disease, Huntington's Chorea, amyotrophic lateral sclerosis, progressive supra-nuclear palsy, Hirchsprung's disease, and other dementias or peripheral neuropathy-related disorders. maintenance of the entire myelin sheath.

[1925] As TANGO 499 family members have homology to riboflavin binding proteins, TANGO 499 nucleic acids, proteins and modulators thereof can be used to modulate cofactor or vitamin concentrations, in particular TANGO 499 nucleic acids, proteins and modulators thereof can be used to modulate vitamin concentrations in and around an embryo, to modulate the development of an embryo, and to modulate the length of time of the pregnancy (i.e., terminating).

[1926] Moreover, TANGO 499 nucleic acids, proteins and modulators thereof can be utilized to modulate the development and progression of cancerous and non-cancerous cell proliferative disorders, such as deregulated proliferation (such as hyperdysplasia, hyper-IgM syndrome, or lymphoproliferative disorders), cirrhosis of the liver (a condition in which scarring has overtaken normal liver regeneration processes), treatment of keloid (hypertrophic scar) formation (disfiguring of the skin in which the scarring process interferes with normal renewal), psoriasis (a common skin condition characterized by excessive proliferation of the skin and delay in proper cell fate determination), benign tumors, fibrocystic conditions, and tissue hypertrophy (e.g., prostatic hyperplasia), cancers such as neoplasms or tumors (such as carcinomas, sarcomas, adenomas or myeloid lymphoma tumors, e.g., fibrosarcoma, myxosarcoma, liposarcoma, chondrosarcoma, osteogenic sarcoma, chordoma, angiosarcoma, endotheliosarcoma, lymphangiosarcoma, lymphangioendotheliosarcoma, synovioma, mesothelioma, Ewing's tumor, leimyosarcoma, rhabdotheliosarcoma, colon sarcoma, pancreatic cancer, breast cancer, ovarian cancer, prostate cancer, squamous cell carcinoma, basal cell carcinoma, adenocarcinoma, sweat gland carcinoma, sebaceous gland carcinoma, papillary carcinoma, papillary adenocarcinomas, cystadenocarcinoma, medullary carcinoma, bronchogenic carcinoma, renal cell carcinoma, hematoma, bile duct carcinoma, melanoma, choriocarcinoma, semicoma, embryonal carcinoma, Wilms' tumor, cervical cancer, testicular tumor, lung carcinoma, small cell carcinoma, bladder carcinoma, epithelial carcinoma, glioma, astrocytoma, medulloblastoma, craniopharyngioma, ependynoma, pinealoma, hemangioblastoma, retinoblastoma), leukemias, (e.g. acute lymphocytic leukemia), acute myelocytic leukemia (myelolastic, promyelocytic, myelomonocytic, monocytic and erythroleukemia), chronic leukemias (chronic myelocytic (granulocytic) leukemia and chronic lymphocytic leukemia), or polycythemia vera, or lymphomas (Hodgkin's disease and non-Hodgkin's diseases), multiple myelomas and Waldrenström's macroglobulinemia.

[1927] TANGO 499 expression can be utilized as a marker (e.g., an in situ marker) for specific tissues (e.g., the pituitary) and/or cells (e.g., pituitary cells) in which TANGO 499 is expressed. TANGO 499 nucleic acids can also be utilized for chromosomal mapping, or as chromosomal markers, e.g., in radiation hybrid mapping.

[1928] TANGO 315, TANGO 330, TANGO 437 and TANGO 480

[1929] The TANGO 315, TANGO 330, TANGO 437 and TANGO 480 proteins and nucleic acid molecules comprise families of molecules having certain conserved structural and functional features.

[1930] For example, the TANGO 315, TANGO 330, TANGO 437 and TANGO 480 proteins of the invention can have signal sequences.

[1931] Thus, in one embodiment, a TANGO 315 form 2 protein can contain a signal sequence of about amino acids 1 to 26. In another embodiment, a TANGO 330 protein can contain a signal sequence of about amino acids 1 to 20. In another embodiment, a TANGO 480 protein can contain a signal sequence of about 1 to 19. In one embodiment, a TANGO 315 family member is a polypeptide comprising the amino acid sequence. In another embodiment, a TANGO 315 family member is a polypeptide comprising the amino acid sequence of SEQ ID NO: 152.

[1932] A TANGO 315 family member can include one or more of the following domains: (1) an extracellular domain; (2) a transmembrane domain; and (3) a cytoplasmic domain. In one embodiment, a TANGO 315 form 1 protein contains an extracellular domain at about amino acid residues 46 to 251, two transmembrane domains at about amino acid residues 29 to 45 and at about amino acid residues 252 to 276, and two cytoplasmic domains at about amino acid residues 1 to 28 and at about amino acid residues 277 to 296 of SEQ ID NO: 152.

[1933] In another embodiment, a TANGO 315 form 1 protein comprises an extracellular domain comprising amino acid residues 1 to 251, a transmembrane domain comprising amino acid residues 252 to 276 and a cytoplasmic domain comprising amino acid residues 277 to 296. In this embodiment, therefore, TANGO 315 protein comprises amino acids 1 to 296 of SEQ ID NO: 152.

[1934] In another embodiment, a TANGO 315 form 2 protein comprises an extracellular domain at about amino acid residues 27 to 232, a transmembrane domain at about amino acid residues 233 to 257 and a cytoplasmic domain at about amino acid residues 258 to 277. In this embodiment, the mature TANGO 315 form 2 protein corresponds to amino acids 27 to 277 of SEQ ID NO: 154.

[1935] A TANGO 315 family member can include a signal sequence. In certain embodiments, a TANGO 315 family member has the amino acid sequence of of SEQ ID NO: 154, and the signal sequence is located at amino acids 1 to 24, 1 to 25, 1 to 26, 1 to 27 or 1 to 28. In such embodiments of the invention, the domains and the mature protein resulting from cleavage of such signal peptides are also included herein. For example, the cleavage of a signal sequence consisting of amino acids 1 to 26 results in an extracellular domain consisting of amino acids 27 to 232 and the mature TANGO 315 form 2 protein corresponding to amino acids 27 to 277 of SEQ ID NO: 154.

[1936] A TANGO 315 family member can include one or more TANGO 315 Ig-like domains. A TANGO 315 Ig-like domain as described herein is about 58 amino acid residues in length and has the following consensus sequence, beginning about 1 to 15 amino acid residues, more preferably about 3 to 10 amino acid residues, and most preferably about amino acid residues from the domain C-terminus: [FYL]-Xaa-C-Xaa-[VA], wherein [FYL] is a phenylalanine, tyrosine or leucine residue (preferably tyrosine), where “Xaa” is any amino acid, C is a cysteine residue, and A is a alanine and V is a valine residue. In one embodiment, a TANGO 315 family member includes one or more Ig-like domains having an amino acid sequence that is at least about 55%, preferably at least about 65%, more preferably at least about 75%, yet more preferably at least about 85%, and most preferably at least about 95% identical to amino acids 151 to 209. In another embodiment, a TANGO 315 family member includes one or more Ig-like domains having an amino acid sequence that is at least about 55%, preferably at least about 65%, more preferably at least about 75%, yet more preferably at least about 85%, and most preferably at least about 95% identical to amino acids 132 to 190.

[1937] In another embodiment, a TANGO 315 family member includes one or more TANGO 315 Ig-like domains having an amino acid sequence that is at least about 55%, preferably at least about 65%, more preferably at least about 75%, yet more preferably at least about 85%, and most preferably at least about 95% identical to amino acids 151 to 209, and has a conserved cysteine residue about 8 residues downstream from the N-terminus of the Ig-like domain. Thus, in this embodiment, amino acid 158 is a cysteine residue. In another embodiment, a TANGO 315 family member includes one or more TANGO 315 Ig-like domains having an amino acid sequence that is at least about 55%, preferably at least about 65%, more preferably at least about 75%, yet more preferably at least about 85%, and most preferably at least about 95% identical to amino acids 132 to 190, and has a conserved cysteine residue about 8 residues downstream from the N-terminus of the Ig-like domain. Thus, in this embodiment, amino acid 139 is a cysteine residue.

[1938] In another embodiment, a TANGO 315 family member includes one or more TANGO 315 Ig-like domains having an amino acid sequence that is at least 55%, preferably at least about 65%, more preferably at least about 75%, yet more preferably at least about 85%, and most preferably at least about 95% identical to amino acids 151 to 209, and has a conserved cysteine residue about 8 residues downstream from the N-terminus of the TANGO 315 Ig-like domain, has a conserved cysteine within the consensus sequence that forms a disulfide with said first conserved cysteine, and has at least one TANGO 315 biological activity as described herein. In yet another embodiment, a TANGO 315 family member includes one or more TANGO 315 Ig-like domains having an amino acid sequence that is at least 55%, preferably at least about 65%, more preferably at least about 75%, yet more preferably at least about 85%, and most preferably at least about 95% identical to amino acids 132 to 190, and has a conserved cysteine residue about 8 residues downstream from the N-terminus of the TANGO 315 Ig-like domain, has a conserved cysteine within the consensus sequence that forms a disulfide with said first conserved cysteine, and has at least one TANGO 315 biological activity as described herein.

[1939] In another embodiment, the Ig-like domain of TANGO 315 is an Ig domain. An Ig domain as used in the context of TANGO 315 is about 58 amino acid residues in length and has the following consensus sequence, beginning at about 1 to 15 amino acid residues, more preferably about 3 to 10 amino acid residues, and most preferably about 5 amino acid residues from the C-terminal end of the domain: [FY]-Xaa-C-Xaa-[VA]-Xaa-H-COO-, wherein [FY] is either a phenylalanine or a tyrosine residue (preferably tyrosine), where “Xaa” is any amino acid, C is a cysteine residue, [VA] is either valine or an alanine residue (preferably alanine), H is a histidine residue and COO- is the C-terminus of the domain. In this embodiment, a TANGO 315 family member includes one or more Ig-like domains having an amino acid sequence that is at least about 55%, preferably at least about 65%, more preferably at least about 75%, yet more preferably at least about 85%, and most preferably at least about 95% identical to amino acids 151 to 209 and/or amino acids 132 to 190.

[1940] A TANGO 330 form 1 protein is encoded by a nucleic acid sequence comprising nucleotides 1 to 3042 (SEQ ID NO: 151). In another embodiment, a TANGO 330 form I has an open reading frame comprised of nucleotides 2 to 2808 of SEQ ID NO: 152. In another embodiment, a TANGO 330 form 1 protein is a polypeptide comprising the amino acid sequence at amino acids 1 to 934 (SEQ ID NO: 152). A TANGO 330 form 2 protein is encoded by a nucleic acid sequence comprising nucleotides 1 to 3808 (SEQ ID NO: 153). In another embodiment, a TANGO 330 form 2 cDNA has an open reading frame comprised of nucleotides 9 to 1448 of SEQ ID NO: 153. In another embodiment, a TANGO 330 form 2 protein is a polypeptide comprising the amino acid sequence at amino acids 1 to 480 (SEQ ID NO: 154).

[1941] A TANGO 330 family member can include one or more of the following domains: (1) an extracellular domain; (2) a transmembrane domain; and (3) a cytoplasmic domain. In one embodiment, a TANGO 330 form 1 protein comprises extracellular domains comprising amino acid residues 1 to 393, a transmembrane domain comprising amino acid residues 394 to 417 and a cytoplasmic domain comprising amino acid residues 418 to 934 of SEQ ID NO: 156. In this embodiment, therefore TANGO 330 protein comprises amino acids 1 to 934 (SEQ ID NO: 156).

[1942] A TANGO 330 family member can include a signal sequence. In certain embodiments, a TANGO 330 family member has the amino acid sequence, and the signal sequence is located at amino acids 1 to 18, 1 to 19, 1 to 21 or 1 to 22. In such embodiments of the invention, the domains and the mature protein resulting from cleavage of such signal peptides are also included herein. For example, the cleavage of the signal sequence of TANGO 330 form 2 at amino acids 1 to 20 results in a mature protein comprising amino acids 21 to 480 (SEQ ID NO: 158).

[1943] A TANGO 330 family member can include one or more fibronectin type 11-like domains. The nucleotide sequence of a typical fibronectin type II domain is disclosed in Pfam Accession Number PF00041. In one embodiment, a TANGO 330 family member includes one or more fibronectin type 11-like domains having an amino acid sequence that is at least about 55%, preferably at least about 65%, more preferably at least about 75%, yet more preferably at least about 85%, and most preferably at least about 95% identical to TANGO 330 form 1 at amino acids 179 to 262 and amino acids 274 to 359, or alternatively, to TANGO 330 form 2 at amino acids 283 to 366 and amino acids 378 to 463 of SEQ ID NO: 158.

[1944] In another embodiment, a TANGO 330 family member includes one or more fibronectin type II-like domains having an amino acid sequence that is at least about 55%, preferably at least about 65%, more preferably at least about 75%, yet more preferably at least about 85%, and most preferably at least about 95% identical to amino acids 179 to 262 and amino acids 274 to 359, or alternatively to amino acids 283 to 366 and amino acids 378 to 463, and has at least one TANGO 330 biological activity as described herein.

[1945] In another embodiment, a TANGO 330 family member includes one or more fibronectin type II domains having an amino acid sequence that is at least about 55%, preferably at least about 65%, more preferably at least about 75%, yet more preferably at least about 85%, and most preferably at least about 95% identical to TANGO 330 form 1 at amino acids 179 to 262 and amino acids 274 to 359, or alternatively, to TANGO 330 form 2 at amino acids 283 to 366 and amino acids 378 to 463. In another embodiment, a TANGO 330 family member includes one or more fibronectin type 11 domains having an amino acid sequence that is at least about 55%, preferably at least about 65%, more preferably at least about 75%, yet more preferably at least about 85%, and most preferably at least about 95% identical to amino acids 179 to 262 and amino acids 274 to 359, or alternatively to amino acids 283 to 366 and amino acids 378 to 463, and has at least one TANGO 330 biological activity as described herein.

[1946] A TANGO 330 family member can include one or more Ig-like domains. A TANGO 330 Ig-like domain as described herein has the following consensus sequence, beginning about 1 to 15 amino acid residues, more preferably about 3 to 10 amino acid residues, and most preferably about 5 amino acid residues from the domain C-terminus: [FY]-Xaa-C-Xaa-[VA], wherein [FY] is either a phenylalanine or a tyrosine residue (preferably tyrosine), where “Xaa” is any amino acid, C is a cysteine residue and [VA] is either a valine or alanine residue. In one embodiment, a TANGO 330 family member includes one or more Ig-like domains having an amino acid sequence that is at least about 55%, preferably at least about 65%, more preferably at least about 75%, yet more preferably at least about 85%, and most preferably at least about 95% identical to amino acids 78 to 136, or amino acids 77 to 147, or amino acids 182 to 240.

[1947] In one embodiment, a TANGO 330 family member includes one or more Ig-like domains having an amino acid sequence that is at least about 55%, preferably at least about 65%, more preferably at least about 75%, yet more preferably at least about 85%, and most preferably at least about 95% identical to amino acids 78 to 136, or amino acids 77 to 147, or amino acids 182 to 240 and has a conserved cysteine residue about 8 residues downstream from the N-terminus of the Ig-like domain.

[1948] In another embodiment, a TANGO 330 family member includes one or more TANGO 330 Ig-like domains having an amino acid sequence that is at least about 55%, preferably at least about 65%, more preferably at least about 75%, yet more preferably at least about 85%, and most preferably at least about 95% identical to amino acids 78 to 136, or amino acids 77 to 147, or amino acids 182 to 240 and has a conserved cysteine residue about 8 residues downstream from the N-terminus of the Ig-like domain. Thus, in this embodiment, the amino residue corresponding to amino acid 85, or to amino acid 84 to amino acid 189.

[1949] In yet another embodiment, a TANGO 330 family member includes one or more TANGO 330 Ig-like domains having an amino acid sequence that is at least 55%, preferably at least about 65%, more preferably at least about 75%, yet more preferably at least about 85%, and most preferably at least about 95% identical to amino acids 78 to 136, or amino acids 77 to 147, or amino acids 182 to 240, and has a conserved cysteine residue about 8 residues downstream from the N-terminus of the Ig-like domain, has a conserved cysteine within the consensus sequence that forms a disulfide with said first conserved cysteine, and has at least one TANGO 330 biological activity as described herein.

[1950] In another embodiment, the Ig-like domain of TANGO 330 is an Ig domain. In this embodiment, a TANGO 330 family member includes one or more Ig-like domains having an amino acid sequence that is at least about 55%, preferably at least about 65%, more preferably at least about 75%, yet more preferably at least about 85%, and most preferably at least about 95% identical to amino acids 78 to 136, or amino acids 77 to 147, or amino acids 182 to 240.

[1951] A TANGO 437 family member can include one or more of the following domains: (1) an extracellular domain; (2) a transmembrane domain; and (3) a cytoplasmic domain.

[1952] In one embodiment, a TANGO 437 protein contains extracellular domains at about amino acid residues 1 to 84, 150 to 155, 241 to 287, 456 to 466, and 524 to 591, transmembrane domains at about amino acid residues 85 to 101, 130 to 149, 156 to 180, 216 to 240, 288 to 312, 436 to 455, 467 to 486, and 506 to 523, and cytoplasmic domains at about amino acid residues 102 to 129, 181 to 215, 313 to 435, and 487 to 505 of SEQ ID NO: 160.

[1953] In another embodiment, a TANGO 437 protein contains extracellular domains at about amino acid residues 1 to 84, 181 to 215, 313 to 435, and 487 to 505, the following seven transmembrane domains at about amino acid residues 85 to 101, 156 to 180, 216 to 240, 288 to 312, 436 to 455, 467 to 486, and 506 to 523, and cytoplasmic domains at about amino acid residues 102 to 155, 241 to 287, 456 to 466, 524 to 591. In these embodiments, the mature TANGO 437 protein corresponds to amino acids 1 to 591 (SEQ ID NO: 160).

[1954] In another embodiment, a TANGO 437-form 2 protein contains extracellular domains at about amino acid residues 1 to 84, 181 to 215, 313 to 435, 524 to 580, and 656 to 671, transmembrane domains at about amino acid residues 85 to 101, 130 to 149, 156 to 180, 216 to 240, 288 to 312, 436 to 455, 467 to 486, 506 to 523, 581 to 601, 639 to 655, and 672 to 694, and cytoplasmic domains at about amino acid residues 102 to 155, 241 to 287, 456 to 505, 602 to 638, and 695 to 752 (SEQ ID NO: 164).

[1955] A TANGO 437 family member can include one or more ion transport protein-like domains. The nucleotide sequence of a typical ion transport protein domain is disclosed in Pfam Accession Number PF00520. A TANGO 437 ion transport protein-like domain as described herein has the following consensus sequence: [L]-[R]-Xaa-Xaa-[R]-Xaa-[L]-[R]-Xaa(n1)-[L]-Xaa(n2)-[S]-Xaa(n3)-[L]-[L], wherein [L] is a leucine residue, [R] is arginine, Xaa is any amino acid, n1 is about 1 to 10, preferably 2 to 7, more preferably 3, n2 is about 1 to 15, more preferably about 8 to 20, more preferably about 16, [S] is serine, and n3 is about 1 to 15, preferably about 5 to 11, more preferably about 8. In one embodiment, a TANGO 437 family member includes one or more ion transport protein-like domains having an amino acid sequence that is at least about 55%, preferably at least about 65%, more preferably at least about 75%, yet more preferably at least about 85%, and most preferably at least about 95% identical to amino acids 82 to 311. In another embodiment, a TANGO 437 family member includes one or more TANGO 437 ion transport protein-like domains having an amino acid sequence that is at least 55%, preferably at least about 65%, more preferably at least about 75%, yet more preferably at least about 85%, and most preferably at least about 95% identical to amino acids 82 to 311, and has at least one TANGO 437 biological activity as described herein.

[1956] A TANGO 437 family member can include one or more putative permease domains. The nucleotide sequence of a typical putative permease domain is disclosed in Pfam Accession Number PF01594. A TANGO 437 putative permease-like domain as described has the following consensus sequence: [P]-Xaa(n1)-[S]-Xaa(3)-[G]-Xaa(n2)-[F]-[G]-Xaa(n3)-[G]-Xaa(4)-[P], wherein P is a proline residue, Xaa is any amino acid, n1 is about 1 to 10, preferably about 3 to 8, more preferably about 5, S is serine, G is glycine, n2 is about 1 to 15, preferably about 2 to 10, more preferably about 3 to 7, F is phenylalanine, and n3 is about 0 to 5, more preferably about 0 to 2. In one embodiment, a TANGO 437 family member includes one or more putative permease domains having an amino acid sequence that is at least about 55%, preferably at least about 65%, more preferably at least about 75%, yet more preferably at least about 85%, and most preferably at least about 95% identical to amino acids 284 to 591. In another embodiment, a TANGO 437 family member includes one or more TANGO 437 putative permease domains having an amino acid sequence that is at least 55%, preferably at least about 65%, more preferably at least about 75%, yet more preferably at least about 85%, and most preferably at least about 95% identical to amino acids 284 to 591, and has at least one TANGO 437 biological activity as described herein.

[1957] A TANGO 480 family member can include one or more of the following domains: (1) an extracellular domain; (2) a transmembrane domain; and (3) a cytoplasmic domain. In one embodiment, a TANGO 480 protein is a transmembrane protein that contains extracellular domains at about amino acid residues 20 to 56 and 113 to 127, transmembrane domains at about amino acid residues 57 to 74, 88 to 112, and 128 to 150, and cytoplasmic domains at about amino acid residues 75 to 87 and 151 to 193 of SEQ ID NO: 162.

[1958] A TANGO 480 family member can include a signal sequence. In certain embodiments, a TANGO 480 family member has the amino acid sequence, and the signal sequence is located at amino acids 1 to 17, 1 to 18, 1 to 19, 1 to 20 or 1 to 21. In such embodiments of the invention, the domains and the mature protein resulting from cleavage of such signal peptides are also included herein. For example, the cleavage of a signal sequence consisting of amino acids 1 to 19 results in an extracellular domain consisting of amino acids 20 to 56 and a mature TANGO 480 protein corresponding to amino acids 20 to 193 of SEQ ID NO: 162.

[1959] Human TANGO 315

[1960] A cDNA encoding human TANGO 315 was identified by analyzing the sequences of clones present in a human natural killer cell library for sequences that encode wholly secreted or transmembrane proteins. This analysis led to the identification of a clone, jthta123e06, encoding human TANGO 315.

[1961] The human TANGO 315 cDNA of this clone is 1463 nucleotides long (FIG. 237; SEQ ID NO: 151). In one embodiment, TANGO 315 is referred to as TANGO 315, form 1. The open reading frame of TANGO 315 form 1 comprises nucleotides 1 to 888, and encodes a transmembrane protein comprising the 296 amino acid sequence depicted in SEQ ID NO: 152. The protein has a predicted molecular weight of 32.6 kDa without post-translational modification.

[1962] FIG. 238 depicts a hydropathy plot of the human TANGO 315 form 1 amino acid sequence depicted in FIG. 237.

[1963] Human TANGO 315 form 1 protein is a transmembrane protein comprising amino acids 1 to 296. In particular, human TANGO 315, form 1 protein contains an extracellular domain comprising at amino acid residues 1 to 251, a transmembrane domain comprising amino acid residues 252 to 276 and a cytoplasmic domain comprising amino acid residues 277 to 296 of SEQ ID NO: 152.

[1964] Alternatively, in another embodiment, a human TANGO 315 protein is a transmembrane protein that contains a cytoplasmic domain comprising amino acid residues 1 to 251, a transmembrane domain comprising amino acid residues 252 to 276 and an extracellular domain comprising amino acid residues 277 to 296 of SEQ ID NO: 152.

[1965] In one embodiment a cDNA sequence of human TANGO 315 has a nucleotide at position 66 which is guanine (G). In this embodiment, the cDNA contains an open reading frame encoding a polypeptide having an amino acid at position 22 that is glutamate (E). In an alternative embodiment, a species variant cDNA sequence of human TANGO 315 has a nucleotide at position 66 which is cytosine (C). In this embodiment, the cDNA contains an open reading frame encoding a polypeptide having an amino acid at position 22 that is aspartate (E), i.e., a conservative substitution.

[1966] In another embodiment a cDNA sequence of human TANGO 315 has a nucleotide at position 67 which is thymidine (T). In this embodiment, the cDNA contains an open reading frame encoding a polypeptide having an amino acid at position 23 that is serine (S). In an alternative embodiment, a species variant cDNA sequence of human TANGO 315 has a nucleotide at position 67 which is adenine (A). In this embodiment, the cDNA contains an open reading frame encoding a polypeptide having an amino acid at position 23 that is threonine (T), i.e., a conservative substitution.

[1967] In another embodiment a cDNA sequence of human TANGO 315 has a nucleotide at position 70 which is guanine (G). In this embodiment, the cDNA contains an open reading frame encoding a polypeptide having an amino acid at position 24 that is valine (V). In an alternative embodiment, a species variant cDNA sequence of human TANGO 315 has a nucleotide at position 70 which is cytosine (C). In this embodiment, the cDNA contains an open reading frame encoding a polypeptide having an amino acid at position 24 that is leucine (L), i.e., a conservative substitution.

[1968] In another embodiment a cDNA sequence of human TANGO 315 has a nucleotide at position 138 which is adenine (A). In this embodiment, the cDNA contains an open reading frame encoding a polypeptide having an amino acid at position 46 that is lysine (K). In an alternative embodiment, a species variant cDNA sequence of human TANGO 315 has a nucleotide at position 138 which is guanine (G). In this embodiment, the cDNA contains an open reading frame encoding a polypeptide having an amino acid at position 46 that is arginine (R), i.e., a conservative substitution.

[1969] Human TANGO 315 form 1 includes an Ig-like domain at amino acids 151 to 209 of SEQ ID NO: 152.

[1970] Four N-glycosylation sites are present in TANGO 315 form 1. The first has the sequence NNST (at amino acid residues 71 to 74), the second has the sequence NCSL (at amino acid residues 95 to 98), the third has the sequence NGSY (at amino acid residues 108 to 111), and the fourth has the sequence NLTC (at amino acid residues 155 to 158). Six protein kinase C phosphorylation sites are present in TANGO 315 form 1. The first has the sequence TQK (at amino acid residues 74 to 76), the second has the sequence SIR (at amino acid residues 99 to 101), the third has the sequence SYK (at amino acid residues 123 to 125), the fourth has the sequence THR (at amino acid residues 137 to 139), the fifth has the sequence TER (at amino acid residues 218 to 220), and the sixth has the sequence TGK (at amino acid residues 243 to 245). TANGO 315 form 1 has four casein kinase II phosphorylation sites. The first has the sequence TVQE (at amino acid residues to 28), the second has the sequence SIRD (at amino acid residues 99 to 102), the third has the sequence SLED (at amino acid residues 238 to 241), and the fourth has the sequence TVEE (at amino acid residues 248 to 251). TANGO 315 form 1 has one tyrosine kinase phosphorylation site with the sequence RRRDNGSY at amino acid residues 104 to 111. Two N-myristylation sites are present in TANGO 315 form 1. The first has the sequence GAGVTT (at amino acid residues 213 to 218) and the second has the sequence GTGKSG (at amino acid residues 242 to 247).

[1971] FIG. 239 depicts an alignment of the amino acid sequence of human TANGO 315 form 1 and the amino acid sequence of CD33 (Accession Number NP_{—}001763). The alignment shows that there is a 59.4% overall amino acid sequence identity between TANGO 315 form 1 and CD33. CD33 is an early or immature marker expressed by myeloid cells. The expression of CD33 has been shown to be associated with the development and/or progression of myelodysplastic syndrome (MDS) and acute myelogenous leukemia (AML) (Eghetany, 1998, Haematologica 83: 1104-1115; Matthews, 1998, Leukemia 12 Suppl. 1:S33-36). As such, TANGO 315, nucleic acids and proteins may be useful, for example, as early markers for the development of MDS and AML.

[1972] FIGS. 240A-240B depicts an alignment of the nucleotide sequence of the coding region of CD33 (Accession Number NM_{—}001772) and the nucleotide sequence of the coding region of human TANGO 315 form 1. The nucleotide sequences of the coding regions of CD33 and human TANGO 315 form 1 are 75.8% identical. The nucleic acid sequence of CD33 (Accession Number NM_{—}001772) and the nucleic acid of sequence of human TANGO 315 form 1 are 67.7% identical.

[1973] FIG. 241 depicts an alignment of the amino acid sequence of TANGO 315 form 1 and the amino acid sequence of Ob binding protein (Accession Number AAB70702). The alignment shows that there is a 52.8% overall amino acid sequence identity between TANGO 315 form 1 and OB-BP-1. OB-BP-1, like CD33, is a member of the sialic acid-binding immunoglobulin superfamily (Siglec) which binds to Leptin (Patel et al., 1999, J. Biol. Chem. 274:22729-22738). Leptin plays a role in the regulation of neuroendocrine function and the energy metabolism of adipocytes and skeletal muscle (Fruhbeck et al, 1998, Clin. Physiol. 18:399-419). As such, TANGO 315, nucleic acids, proteins and modulators thereof may be useful, for example, to modulate the development of obesity, anorexia nervosa, diabetes mellitus, polycystic ovary syndrome, acquired immunodeficiency syndrome, cancer, nephropathy, thyroid disease, Cushing's syndrome, and growth hormone deficiency.

[1974] FIGS. 242A-242B depicts an alignment of the nucleotide sequence of human TANGO 315 form 1 coding region and the nucleotide sequence of human OB-BP-1 coding region (Accession Number U71382). The nucleotide sequences of the coding regions are 74.2% identical. The nucleotide sequence of the TANGO 315 form 1 nucleic acid sequence and human OB-BP-1 cDNA (Accession Number U71382) have an overall sequence identity of 65%.

[1975] In another embodiment, TANGO 315 is referred to as TANGO 315 form 2. The open reading frame of TANGO 315 form 2, comprises nucleotides 58 to 888, and encodes a transmembrane protein comprising the amino acid sequence shown in FIGS. 243A-243B (SEQ ID NO: 153).

[1976] FIG. 244 depicts a hydropathy plot of the human TANGO 315 form 2 amino acid sequence depicted in FIGS. 243A-243B.

[1977] The signal peptide of human TANGO 315 form 2 includes a 26 amino acid signal peptide (amino acid 1 to amino acid 26 of SEQ ID NO: 154) preceding the mature TANGO 315 form 2 protein (corresponding to amino acid 27 to amino acid 277 of SEQ ID NO: 154). The molecular weight of TANGO 315 form 2 protein without post-translational modifications is 30.6 kDa, and after cleavage of the signal peptide the molecular weight is 27.6 kDa.

[1978] Human TANGO 315 form 2 protein is a transmembrane protein comprising amino acids 1 to 277 (SEQ ID NO: 154). In particular, TANGO 315 form 2 contains an extracellular domain comprising amino acid residues 27 to 232, a transmembrane domain comprising amino acid residues 233 to 257 and a cytoplasmic domain comprising amino acid residues 258 to 277 of SEQ ID NO: 154.

[1979] Human TANGO 315 form 2 includes an Ig-like domain at amino acids 132 to 190 of SEQ ID NO: 154.

[1980] Four N-glycosylation sites are present in TANGO 315 form 2. The first has the sequence NNST (at amino acid residues 52 to 55), the second has the sequence NCSL (at amino acid residues 76 to 79), the third has the sequence NGSY (at amino acid residues 89 to 92), and the fourth has the sequence NLTC (at amino acid residues 136 to 139). Six protein kinase C phosphorylation sites are present in TANGO 315 form 2. The first has the sequence TQK (at amino acid residues 55 to 57), the second has the sequence SIR (at amino acid residues 80 to 82), the third has the sequence SYK (at amino acid residues 104 to 106), the fourth has the sequence THR (at amino acid residues 118 to 120), the fifth has the sequence TER (at amino acid residues 199 to 201), and the sixth has the sequence TGK (at amino acid residues 224 to 226). TANGO 315 form 2 has four casein kinase II phosphorylation sites. The first has the sequence TVQE (at amino acid residues 6 to 9), the second has the sequence SIRD (at amino acid residues 80 to 83), the third has the sequence SLED (at amino acid residues 219 to 222), and the fourth has the sequence TVEE (at amino acid residues 229 to 232). TANGO 315 form 2 has one tyrosine kinase phosphorylation site with the sequence RRRDNGSY at amino acid residues 85 to 92. Two N-mytistylation sites are present in TANGO 315 form 2. The first has the sequence GAGVTT (at amino acid residues 194 to 199) and the second has the sequence GTGKSG (at amino acid residues 223 to 228).

[1981] FIG. 245 depicts a local alignment of the amino acid of TANGO 315 form 2 and the amino acid sequence of CD33 (Accession Number NP_{—}001763). The alignment shows that there is a 62% overall amino acid sequence identity between TANGO 315 form 2 and CD33.

[1982] FIGS. 246A-246B depicts a local alignment of the nucleotide sequence of CD33 (Accession Number NM_{—}001772) and the nucleotide sequence of human TANGO 315 form 2. The nucleotide sequences of the coding regions of CD33 and human TANGO 315 form 2 are 75.4% identical.

[1983] FIG. 247 depicts an alignment of the amino acid sequence of TANGO 315 form 2and the amino acid sequence of OB-BP-1 (Accession Number AAB70702). The alignment shows that there is a 53.3% overall amino acid sequence identity between TANGO 315 form 2 and OB-BP-1.

[1984] FIGS. 248A-248B depicts an alignment of the nucleotide sequence of human TANGO 315 form 2 coding region and the nucleotide sequence of human OB-BP-1 coding region (Accession Number U71382). The nucleotide sequences of the coding regions are 73.2% identical.

[1985] TANGO 315 expression was detected in mast cell line (HMC-1 control) and d8 dendritic cells. No expression was detected in approximately 180 other tissues analyzed.

[1986] Clone EpT315, which encodes human TANGO 315, was deposited with the American Type Culture Collection (10801 University Boulevard, Manassas, Va. 20110-2209) on Oct. 1, 1999 and assigned PTA-816. This deposit will be maintained under the terms of the Budapest Treaty on the International Recognition of the Deposit of Microorganisms for the Purposes of Patent Procedure. This deposit was made merely as a convenience for those of skill in the art and is not an admission that a deposit is required under 35 U.S.C. §112.

[1987] Uses of TANGO 315 Nucleic Acids, Polypeptides and Modulators Thereof

[1988] As TANGO 315 was originally found in a human natural killer cell library, TANGO 315 nucleic acids, proteins, and modulators thereof can be used to modulate and/or track the proliferation, development, differentiation, maturation, activity and/or function of immune cells, e.g., natural killer cells, mast cells, and dendritic cells. TANGO 315 nucleic acids, proteins and modulators thereof can be utilized to modulate immune-related processes, e.g., the host immune response by, for example, modulating the formation of and/or binding to immune complexes, detection and defense against surface antigens and bacteria, and immune surveillance for rapid removal or pathogens. Such TANGO 315 nucleic acids, proteins and modulators thereof can be utilized to treat, e.g., to ameliorate incidence of any symptoms associated with disorders that involve such immune-related processes, including, but not limited to, viral or bacterial infection, and inflammatory disorders (e.g., bacterial or viral infection, psoriasis, allergies and inflammatory bowel diseases) and autoimmune disorders (e.g., transplant rejection and Hashimoto's disease). TANGO 315 nucleic acids, proteins and modulators thereof can be used to modulate, diagnose, monitor or treat immune related disorders, e.g., immunodeficiency disorders (e.g., HIV), viral disorders, cancers, and inflammatory disorders (e.g., bacterial or viral infection, psoriasis, septicemia, arthritis, allergic reactions). TANGO 315 nucleic acids, proteins and modulators thereof can be used to modulate, diagnose, monitor or treat atopic conditions, such as asthma and allergy, including allergic rhinitis, gastrointestinal allergies, including food allergies, eosinophilia, conjunctivitis, glomerular nephritis, certain pathogen susceptibilities such as helminthic (e.g., leishmaniasis) and certain viral infections, including HIV, and bacterial infections, including tuberculosis and lepromatous leprosy.

[1989] As TANGO 315 was cloned from a natural killer cell library, TANGO 315 nucleic acids, proteins and modulators thereof can also be used to diagnose, monitor and/or treat diseases associated with aberrant natural killer cell activation such as chronic natural killer cell lymphocytosis, aggressive non-T, non-B natural killer cell lymphoma/leukemia (ANKL/L), and Chediak-Higashi syndrome. Further, TANGO 315 nucleic acids, proteins and modulators thereof can be used to alleviate one or more symptoms associated with such disorders.

[1990] TANGO 315 is expressed by mast cells. Therefore, TANGO 315 nucleic acid, proteins and modulators thereof can also be utilized to diagnose, monitor modulate and/or treat disorders associated with aberrant mast cell proliferation, differentiation, maturation, activity and/or function. For example, TANGO 315 nucleic acids, proteins and modulators thereof can be utilized to treat inflammatory conditions (e.g., rhinitis, conjunctivitis, asthma and allergy) which involve or are mediated by mast activity.

[1991] TANGO 315 exhibits homology to CD33 (otherwise known as Siglec-3). CD33 is expressed by myelomonocytic cells and is a marker of disorders such as myeloid-related leukemia. Therefore, TANGO 315 nucleic acids, proteins and modulators thereof can be utilized to track and/or modulate the proliferation, differentiation, maturation, activity and/or function of myeloid cells. TANGO 315 nucleic acids, proteins and modulators thereof can be utilized to diagnose, monitor, modulate and/or treat disorders associated with abnormal function of myeloid cells. Such disorders can include, but are not limited to, myelodysplastic syndrome (MDS) acute myelogenous leukemia (AML), chronic myeloid leukemia, agnogenic myeloid (megakaryotic/granukaryotic metaplasia (AMM), and idiopathic myelofibrosis (IMF).

[1992] As TANGO 315 has homology to OB-BP-1, TANGO 315 nucleic acids, proteins and modulators thereof can be used to track and/or modulate adipocyte function and activity. TANGO 315 nucleic acids, proteins and modulators thereof can be used to track and/or modulate skeletal muscle function and activity. TANGO 315 nucleic acids, proteins and modulators thereof can be used to track and/or modulate neuroendocrine function, e.g., neuroendocrine secretion (e.g., secretion of growth hormone, melatonin, opioids, corticotropin-releasing hormones and cytokines). TANGO 315 nucleic acids, proteins and modulators thereof can be used to diagnose, monitor, modulate and/or treat (that is, alleviate a symptom of) obesity, anorexia nervosa, diabetes mellitus, polycystic ovary syndrome, acquired immunodeficiency syndrome, cancer, nephropathy, thyroid disease, Cushing's syndrome, and growth hormone deficiency.

[1993] In further light of TANGO 315's homology to OB-BP-1, TANGO 315 nucleic acids, proteins, and modulators thereof can be used to track and/or modulate embryonic development. TANGO 315 nucleic acids, proteins and modulators thereof can be used to diagnose, monitor, modulate and/or treat embryonic disorders.

[1994] TANGO 315 nucleic acids, proteins and modulators thereof can be used to track and/or modulate intracellular signaling. TANGO 315 nucleic acids, proteins and modulators thereof can also be utilized to modulate immune activation, for example, antagonists to TANGO 315 action, such as peptides, antibodies or small molecules that decrease or block TANGO 315 activity, e.g., binding to extracellular matrix components, e.g., integrins, or that prevent TANGO 315 signaling, can be used as immune system activation blockers. In another example, agonists that mimic or partially mimic TANGO 315 activity, such as peptides, antibodies or small molecules, can be used to induce immune system activation. Antibodies may activate or inhibit the cell adhesion, proliferation and activation, and may help in treating infection, autoimmunity, inflammation, and cancer by affecting these cellular processes. Further, TANGO 315 nucleic acids, proteins and modulators thereof can be utilized to track and/or modulate intercellular signaling in the immune system. For example, TANGO 315 nucleic acids, proteins and modulators thereof can be used to modulate intercellular signal transduction in immune stimulation or suppression and modulate immune cell membrane adhesion to ECM components, during development, e.g., late stages of development.

[1995] TANGO 315 nucleic acids and/or proteins can be utilized as markers for immune cells (e.g., T cells, B cells, natural killer cells, and mast cells) and/or adipocytes. Further, TANGO 315 nucleic acids can be utilized for chromosomal mapping, or as chromosomal markers, e.g., in radiation hybrid mapping.

[1996] Human TANGO 330 Form 1

[1997] A cDNA encoding human TANGO 330 was identified by analyzing the sequences of clones present in an adrenal gland library for sequences that encode wholly secreted or transmembrane proteins. This analysis led to the identification of a clone, jthAa060g22 encoding human TANGO 330 form 1. The human TANGO 330 form 1 cDNA of this clone comprises 3042 nucleotides (FIGS. 249A-249D; SEQ ID NO: 155). The open reading frame of this cDNA, nucleotides 2 to 2803, encodes a transmembrane protein comprising the 934 amino acid sequence depicted in SEQ ID NO: 156. The molecular weight of the TANGO 330 form 1 protein without post-translational modifications is 99.9 kDa.

[1998] Human TANGO 330 form 1 protein is a transmembrane protein comprising amino acids 1 to 934. In particular, TANGO 330 form 1 contains an extracellular domain comprising amino acid residues 1 to 393, a transmembrane domain comprising acid residues 394 to 417, and cytoplasmic domains comprising amino acid residues 418 to 934 of SEQ ID NO: 156.

[1999] Alternatively, in another embodiment, a human TANGO 330 form 1 protein is a transmembrane protein that contains a cytoplasmic domain comprising amino acid residues 1 to 393, a transmembrane domain comprising acid residues 394 to 417, and an extracellular domains comprising amino acid residues 418 to 934 of SEQ ID NO: 156.

[2000] In one embodiment a cDNA sequence of human TANGO 330 form 1 has a nucleotide at position 3 which is guanine (G). In this embodiment, the cDNA contains an open reading frame encoding a polypeptide having an amino acid at position 1 that is glutamate (E). In an alternative embodiment, a species variant cDNA sequence of human TANGO 330 form 1 has a nucleotide at position 3 which is cytosine (C). In this embodiment, the cDNA contains an open reading frame encoding a polypeptide having an amino acid at position 1 that is aspartate (D), i.e., a conservative substitution.

[2001] In another embodiment a cDNA sequence of human TANGO 330 form 1 has a nucleotide at position 4 which is adenine (A). In this embodiment, the cDNA contains an open reading frame encoding a polypeptide having an amino acid at position 2 that is threonine (T). In an alternative embodiment, a species variant cDNA sequence of human TANGO 330 form 1 has a nucleotide at position 4 which is thymidine (T). In this embodiment, the cDNA contains an open reading frame encoding a polypeptide having an amino acid at position 2 that is serine (S), i.e., a conservative substitution.

[2002] In another embodiment a cDNA sequence of human TANGO 330 form 1 has a nucleotide at position 8 which is cytosine (C). In this embodiment, the cDNA contains an open reading frame encoding a polypeptide having an amino acid at position 3 that is alanine (A). In an alternative embodiment, a species variant cDNA sequence of human TANGO 330 form 1 has a nucleotide at position 8 which is thymidine (T). In this embodiment, the cDNA contains an open reading frame encoding a polypeptide having an amino acid at position 3 that is valine (V), i.e., a conservative substitution.

[2003] In another embodiment a cDNA sequence of human TANGO 330 form 1 has a nucleotide at position 158 which is guanine (G). In this embodiment, the cDNA contains an open reading frame encoding a polypeptide having an amino acid at position 53 that is arginine (R). In an alternative embodiment, a species variant cDNA sequence of human TANGO 330 form 1 has a nucleotide at position 158 which is adenine (A). In this embodiment, the cDNA contains an open reading frame encoding a polypeptide having an amino acid at position 53 that is lysine (K), i.e., a conservative substitution.

[2004] Human TANGO 330 form 1 has six N-glycosylation sites with the first sequence NVTL (at amino acid residues 173 to 176), the second has the sequence NGTV (at amino acid residues 287 to 290), the third has the sequence NTSL (at amino acid residues 316 to 319), the fourth has the sequence NWTV (at amino acid residues 323 to 326), the fifth has the sequence NLSQ (at amino acid residues 607 to 610), and the sixth has the sequence NLSL (at amino acid residues 875 to 878).

[2005] Fifteen protein kinase C phospborylation sites are present in TANGO 330. The first has the sequence SNR (at amino acid residues 44 to 46), the second has the sequence SWK (at amino acid residues 194 to 196), the third has the sequence SGR (at amino acid residues 254 to 256), the fourth has the sequence TLK (at amino acid residues 282 to 284), the fifth has the sequence TLK (at amino acid residues 391 to 393), the sixth has the sequence TWR (at amino acid residues 455 to 457), the seventh has the sequence SSR (at amino acid residues 472 to 474), the eighth has the sequence SRR (at amino acid residues 553 to 555), the ninth has the sequence SPR (at amino acid residues 559 to 561), the tenth has the sequence SSR (at amino acid residues 701 to 703), the eleventh has the sequence TPR (at amino acid residues 737 to 739), the twelfth has the sequence SAR (at amino acid residues 814 to 816), the seventh has the sequence SPR (at amino acid residues 865 to 867), the fourteenth has the sequence TQR (at amino acid residues 896 to 898), and the fifteenth has the sequence SQR (at amino acid residues 914 to 916).

[2006] Human TANGO 330 has fourteen casein kinase II phosphorylation sites. The first has the sequence SIQE (at amino acid residues 151 to 154), the second has the sequence TQLE (at amino acid residues 331 to 334), the third has the sequence TSED (at amino acid residues 434 to 437), the fourth has the sequence SSSD (at amino acid residues 546 to 559), the fifth has the sequence SSNE (at amino acid residues 632 to 635), the sixth has the sequence SLGE (at amino acid residues 711 to 714), the seventh has the sequence TPEE (at amino acid residues 721 to 724), the eighth has the sequence SEGE (at amino acid residues 732 to 735), the ninth has the sequence TASE (at amino acid residues 762 to 765), the tenth has the sequence TPSE (at amino acid residues 794 to 797), the eleventh has the sequence SASE (at amino acid residues 806 to 809), the twelfth has the sequence SSSD (at amino acid residues 821 to 824), the thirteenth has the sequence SPRD (at amino acid residues 865 to 868), and the fourteenth has the sequence SPVD (at amino acid residues 929 to 932).

[2007] Human TANGO 330 has a tyrosine kinase phosphorylation site with the sequence KSDEGTY (at amino acid residues 126 to 132).

[2008] Human TANGO 330 has fourteen N-myristoylation sites. The first has the sequence GQALST (at amino acid residues 29 to 34), the second has the sequence GVYTCE (at amino acid residues 37 to 42), the third has the sequence GTAVSR (at amino acid residues 48 to 53), the fourth has the sequence GARLSV (at amino acid residues 54 to 59), the fifth has the sequence GTYMCV (at amino acid residues 130 to 135), the sixth has the sequence GAPWAE (at amino acid residues 221 to 226), the seventh has the sequence GLHWGQ (at amino acid residues 239 to 244), the eighth has the sequence GIIRGY (at amino acid residues 304 to 309), the ninth has the sequence GAGAGE (at amino acid residues 352 to 357) the tenth has the sequence GTAVCI (at amino acid residues 411 to 416), the eleventh has the sequence GSLIAE (at amino acid residues 510 to 515), the twelfth has the sequence GNRGSK (at amino acid residues 601 to 606), the thirteenth has the sequence GSLANG (at amino acid residues 798 to 803), and the fourteenth has the sequence GSFLAD (at amino acid residues 825 to 830).

[2009] FIGS. 251A-251G depicts a local alignment of the nucleotide sequence of human Roundabout (Accession Number AF040990) and the nucleotide sequence of human TANGO 330 form 1 shown in. The aligned nucleotide sequences of human Roundabout and human TANGO 330 form 1 are 56.9% identical. This alignment was performed using the ALIGN alignment program with a PAM 120 scoring matrix, a gap length penalty of 12, and a gap penalty of 4.

[2010] FIGS. 252A-252B depicts an alignment of the amino acid sequence of human Roundabout (Accession Number AAC39575) and the amino acid sequence of human TANGO 330 depicted in. The amino acid sequences of human Roundabout and human TANGO 330 are 26.6% identical. This alignment was performed using the ALIGN alignment program with a PAM120 scoring matrix, a gap length penalty of 12, and a gap penalty of 4.

[2011] Clone 330a, which encodes human TANGO 330, was deposited with the American Type Culture Collection (10801 University Boulevard, Manassas, Va. 20110-2209) on Oct. 1, 1999 and assigned PTA-816. This deposit will be maintained under the terms of the Budapest Treaty on the International Recognition of the Deposit of Microorganisms for the Purposes of Patent Procedure. This deposit was made merely as a convenience for those of skill in the art and is not an admission that a deposit is required under 35 U.S.C. §112.

[2012] Human TANGO 330 Form 2

[2013] A cDNA encoding human TANGO 330 was identified by analyzing the sequences of clones present in an astrocyte library for sequences that encode wholly secreted or transmembrane proteins. This analysis led to the identification of a clone, Jthxe181e12, encoding human TANGO 330 form 2. The human TANGO 330 form 2 cDNA of this clone comprises 3808 nucleotides (FIGS. 250A-250C; SEQ ID NO: 157). The open reading frame of this cDNA, nucleotides 9 to 1448, encodes a secreted protein comprising the 480 amino acid sequence depicted in SEQ ID NO: 158.

[2014] The signal peptide prediction program SIGNALP (Nielsen et al., 1997, Protein Engineering 10:1-6) predicted that human TANGO 330 form 2 includes a 20 amino acid signal peptide (amino acid 1 to amino acid 20 of SEQ ID NO: 158) preceding the mature TANGO 330 form 2 protein (corresponding to amino acid 21 to amino acid 480 of SEQ ID NO: 158). The molecular weight of a TANGO 330 protein without post-translational modification is 51.5 kDa, and after cleavage of the signal peptide the molecular weight of TANGO 330 form 2 is 49.3 kDa.

[2015] In instances wherein the signal peptide is not cleaved, a human TANGO 330 form 2 protein is a transmembrane protein that contains an extracellular domain corresponding to amino acids 21 to 480 and a transmembrane domain amino acids 1 to 20 of SEQ ID NO: 158.

[2016] Human TANGO 330 form 2 has four N-glycosylation sites with the first sequence NVTL (at amino acid residues 277 to 280), the second has the sequence NGTV (at amino acid residues 391 to 394), the third has the sequence NTSL (at amino acid residues 420 to 423), and the fourth has the sequence NWTV (at amino acid residues 427 to 430).

[2017] Human TANGO 330 form 2 has one cAMP and cGMP dependent protein kinase phosphorylation site which has the sequence RKLT (at amino acid residues 30 to 33).

[2018] Six protein kinase C phosphorylation sites are present in TANGO 330 form 2. The first has the sequence SLK (at amino acid residues 15 to 17), the second has the sequence TIR (at amino acid residues 93 to 95), the third has the sequence SNR (at amino acid residues 148 to 150), the fourth has the sequence SWK (at amino acid residues 298 to 300), the fifth has the sequence SGR (at amino acid residues 358 to 360), and the sixth has the sequence TLK (at amino acid residues 386 to 388).

[2019] Human TANGO 330 has three casein kinase II phosphorylation sites. The first has the sequence SISE (at amino acid residues 44 to 47), the second has the sequence SIQE (at amino acid residues 255 to 258), the third has the sequence TQLE (at amino acid residues 435 to 438).

[2020] Human TANGO 330 has a tyrosine kinase phosphorylation site with the sequence KSDEGTY (at amino acid residues 230 to 236).

[2021] Human TANGO 330 has ten N-myristoylation sites. The first has the sequence GQPLSM (at amino acid residues 100 to 105), the second has the sequence GQALST (at amino acid residues 133 to 138), the third has the sequence GVYTCE (at amino acid residues 141 to 146), the fourth has the sequence GTAVSR (at amino acid residues 152 to 157), the fifth has the sequence GARLSV (at amino acid residues 158 to 163), the sixth has the sequence GTYMCV (at amino acid residues 234 to 239), the seventh has the sequence GAPWAE (at amino acid residues 325 to 330), the eighth has the sequence GLHWGQ (at amino acid residues 343 to 348), the ninth has the sequence GIIRGY (at amino acid residues 408 to 413), and the tenth has the sequence GAGAGE (at amino acid residues 456 to 461).

[2022] FIGS. 253A-253F depicts an alignment of the nucleotide sequence of TANGO 330 form 1 and the nucleotide sequence of human TANGO 330 form 2. The nucleotide sequences of TANGO 330 form 1 and TANGO 330 form 2 are 97.4% identical over the local area of similar nucleotides. TANGO 330 form 1 and form 2 differ 5′ of nucleotide 394 of TANGO 330 form 2 and 5′ of nucleotide 75 of TANGO 330 form 2. In addition, TANGO 330 form 2 has a five base pair deletion at nucleotide 1336, corresponding to nucleotides 1116 to 1120 of TANGO 330 form 1 resulting in a frameshift that leads to a truncation of the protein immediately prior to the nucleotides that encode for the transmembrane domain. These alignments were performed using the ALIGN alignment program with a PAM120 scoring matrix, a gap length penalty of 12, and a gap penalty of 4.

[2023] FIG. 254 depicts an alignment of the amino acid sequence of TANGO 330 form 1 shown in and the amino acid sequence of TANGO 330 form 2 shown in. The amino acid sequences of TANGO 330 form 1 and TANGO 330 form 2, are 94.1% identical over the 480 contiguous amino acids of TANGO 330 form 2 and the portion of the corresponding amino acid sequence of TANGO 330 form 1. This alignment was performed using the ALIGN alignment program with a PAM120 scoring matrix, a gap length penalty of 12, and a gap penalty of 4.

[2024] Clone 330b, which encodes human TANGO 330, was deposited with the American Type Culture Collection (10801 University Boulevard, Manassas, Va. 20110-2209) on Oct. 1, 1999 and assigned PTA-816. This deposit will be maintained under the terms of the Budapest Treaty on the International Recognition of the Deposit of Microorganisms for the Purposes of Patent Procedure. This deposit was made merely as a convenience for those of skill in the art and is not an admission that a deposit is required under 35 U.S.C. §112.

[2025] Uses of TANGO 330 Nucleic Acids, Polypeptides, and Modulators Thereof

[2026] As TANGO 330 form 1 was isolated from an adrenal gland library, TANGO 330, preferably form 2, nucleic acids, proteins and modulators thereof can be utilized to track and/or modulate the function of normal or dysfunctional adrenal cells and tissues. TANGO 330 nucleic acids, proteins or modulators thereof can be used to diagnose, monitor and/or treat disorders of the adrenal cortex such as hypoadrenalism (e.g. primary chronic or acute adrenocortical insufficiency, and secondary adrenocortical insufficiency), hyperadrenalism (Cushing's syndrome, primary hyperaldosteronism, adrenal virilism, and adrenal hyperplasia), or neoplasia (e.g., adrenal adenoma and cortical carcinoma). TANGO 330 nucleic acids, proteins or modulators thereof can also be used to diagnose, monitor and/or treat disorders of the adrenal medulla such as neoplasms (e.g., pheochromocytomas, neuroblastomas, and ganglioneuromas).

[2027] As human TANGO 330 form 2 was originally identified in an astrocyte library, TANGO 330 nucleic acids, proteins, and modulators thereof can be used to track and/or modulate the proliferation, activation, maturation, development, differentiation, and/or function of glial cells e.g., astrocytes and oligodendrocytes. TANGO 330 nucleic acids, proteins and modulators thereof can be used to diagnose, monitor and/or treat glial cell-related disorders, e.g., astrocytoma and glioblastoma.

[2028] In light of the above and the fact that TANGO 330 family members have characteristics of immunoglobulin superfamily proteins which are cell surface molecules involved in signal transduction and cellular proliferation, TANGO 330 nucleic acids, proteins and modulators thereof can be utilized to track and/or modulate the development and progression of cancerous and non-cancerous cell proliferative disorders such as deregulated proliferation (such as hyperdysplasia, hyper-IgM syndrome, or lymphoproliferative disorders), cirrhosis of the liver (a condition in which scarring has overtaken normal liver regeneration processes), treatment of keloid (hypertrophic scar) formation (disfiguring of the skin in which the scarring process interferes with normal renewal), psoriasis (a common skin condition characterized by excessive proliferation of the skin and delay in proper cell fate determination), benign tumors, fibrocystic conditions, tissue hypertrophy (e.g., prostatic hyperplasia), and cancers such as neoplasms or tumors (such as carcinomas, sarcomas, adenomas or myeloid lymphoma tumors, e.g., fibrosarcoma, myxosarcoma, liposarcoma, chondrosarcoma, osteogenic sarcoma, chordoma, angiosarcoma, endotheliosarcoma, lymphangiosarcoma, lymphangioendotheliosarcoma, synovioma, mesothelioma, Ewing's tumor, leimyosarcoma, rhabdotheliosarcoma, colon sarcoma, pancreatic cancer, breast cancer, ovarian cancer, prostate cancer, squamous cell carcinoma, basal cell carcinoma, adenocarcinoma, sweat gland carcinoma, sebaceous gland carcinoma, papillary carcinoma, papillary adenocarcinomas, cystadenocarcinoma, medullary carcinoma, bronchogenic carcinoma, renal cell carcinoma, hematoma, bile duct carcinoma, melanoma, choriocarcinoma, semicoma, embryonal carcinoma, Wilms' tumor, cervical cancer, testicular tumor, lung carcinoma, small cell carcinoma, bladder carcinoma, epithelial carcinoma, glioma, astrocytoma, medulloblastoma, craniopharyngioma, ependynoma, pinealoma, hemangioblastoma, retinoblastoma), leukemias (e.g. acute lymphocytic leukemia), acute myelocytic leukemia (myelolastic, promyelocytic, myelomonocytic, monocytic and erythroleukemia), chronic leukemias (chronic myelocytic (granulocytic) leukemia and chronic lymphocytic leukemia), polycythemia vera, lymphomas (Hodgkin's disease and non-Hodgkin's diseases), multiple myelomas and Waldenström's macroglobulinemia.

[2029] Furthermore, TANGO 330 nucleic acids, proteins and modulators thereof can be utilized to track and/or modulate immune activation. For example, antagonists to TANGO 330 action, such as peptides, antibodies or small molecules that decrease or block TANGO 330 activity, e.g., binding to extracellular matrix components, e.g., integrins, or that prevent TANGO 330 signaling can be used as immune system activation blockers. In another example, agonists that mimic or partially mimic TANGO 330 activity, such as peptides, antibodies or small molecules, can be used to induce immune system activation. Antibodies may activate or inhibit the cell adhesion, proliferation and activation, and may help in treating infection, autoimmunity, inflammation, and cancer by affecting these cellular processes. TANGO 330 nucleic acids, proteins and modulators thereof can also be utilized to track and/or modulate intercellular signaling in the immune system. For example, TANGO 330 nucleic acids, proteins and modulators thereof can be used to modulate intercellular signal transduction in immune stimulation or suppression and modulate immune cell membrane adhesion to ECM components, during development, e.g., late stages of development.

[2030] As TANGO 330 exhibits homology to roundabout, which is the cellular receptor for SLIT proteins, TANGO 330 proteins, nucleic acids and modulators thereof may be used to track and/or modulate the development, activity, and maintenance of neural tissues or cells by e.g., protein-protein interactions. TANGO 330 nucleic acids, proteins and modulators thereof may also modulate neural function e.g., sensory neural cell signaling. TANGO 330 protein, nucleic acids and modulators thereof could also be useful to diagnose, monitor and/or treat neural related disorders or neural damage such as for regenerative neural repair after damage by trauma, degeneration, or inflammation, e.g., multiple sclerosis, spinal cord injuries, infarction, infection, malignancy, exposure to toxic agents, nutritional deficiency, paraneoplastic syndromes, and degenerative nerve diseases including but not limited to Alzheimer's disease, Parkinson's disease, Huntington's Chorea, amyotrophic lateral sclerosis, progressive supra-nuclear palsy, and other dementia.

[2031] As TANGO 330 proteins contain fibronectin domains, TANGO 330 nucleic acids, proteins and modulators thereof can be utilized to track and/or modulate cellular migration and invasion through the cell matrix. For example, TANGO 330 nucleic acids, proteins and modulators thereof can be used to modulate such cellular process as intracellular responses to cell adhesion including stimulation of migration, the assembly of an F-actin cytoskeleton and specialized structures called focal contacts, changes of cytoplasmic pH and calcium ion concentration, and modulation of proliferation and gene expression. Fibronectin, and thus, TANGO 330 nucleic acids, proteins and modulators thereof may also modulate cellular responses to fibronectin substrates, such responses include adhesion, migration, assembly of extracellular matrix, and signal transduction.

[2032] TANGO 330 nucleic acids and/or proteins can be utilized as markers for adrenal cells and glial cells (e.g., astrocytes and oligodendrocytes). Further, TANGO 330 nucleic acids can be utilized for chromosomal mapping, or as chromosomal markers, e.g., in radiation hybrid mapping.

[2033] Human TANGO 437

[2034] A cDNA encoding human TANGO 437 was identified by analyzing the sequences of clones present in a human mixed lymphocyte reaction library for sequences that encode wholly secreted or transmembrane proteins. This analysis led to the identification of a clone, jthLa045b02, encoding full-length human TANGO 437. The human TANGO 437 cDNA of this clone is 4336 nucleotides long (FIGS. 255A-255D; SEQ ID NO: 159). The open reading frame of this cDNA, nucleotides 43 to 1815, encodes a 591 amino acid transmembrane protein (SEQ ID NO: 160). The predicted molecular weight of a TANGO 437 protein without post-translational modifications is 66.5 kDa.

[2035] A clone encoding TANGO 437-form 2 was identified as well, the cDNA of which is 3720 nucleotides long (FIGS. 260A-260E; SEQ ID NO: 163). The open reading frame of this cDNA, nucleotides 43 to 2298, encodes a 752 amino acid transmembrane protein (SEQ ID NO: 164). The predicted molecular weight of a TANGO 437 protein without post-translational modifications is 85.3 kDa.

[2036] FIGS. 256 and 261 depict hydropathy plots of partial and full length human TANGO 437, respectively.

[2037] Human TANGO 437 protein is a transmembrane protein that contains extracellular domains at amino acid residues 1 to 84, 150 to 155, 241 to 287, 456 to 466, and 524 to 591, transmembrane domains at amino acid residues 85 to 101, 130 to 149, 156 to 180, 216 to 240, 288 to 312, 436 to 455, 467 to 486, and 506 to 523, and cytoplasmic domains at amino acid residues 102 to 129, 181 to 215, 313 to 435, and 487 to 505 of SEQ ID NO: 160.

[2038] Alternatively, a TANGO 437 protein contains extracellular domains at amino acid residues 1 to 84, 181 to 215, 313 to 435, and 487 to 505, the following seven transmembrane domains at amino acid residues 85 to 101, 156 to 180, 216 to 240, 288 to 312, 436 to 455, 467 to 486, and 506 to 523, and cytoplasmic domains at amino acid residues 102 to 129, 241 to 287, 456 to 466, 524 to 591 of SEQ ID NO: 160.

[2039] Alternatively, in another embodiment, a human TANGO 437 protein is a transmembrane protein that contains cytoplasmic domains at amino acid residues 1 to 84, 150 to 155, 241 to 287, 456 to 466, and 524 to 591, transmembrane domains at amino acid residues 85 to 101, 130 to 149, 156 to 180, 216 to 240, 288 to 312, 436 to 455, 467 to 486, and 506 to 523, and extracellular domains at amino acid residues 102 to 129, 181 to 215, 313 to 435, and 487 to 505 of SEQ ID NO: 160.

[2040] Alternatively, a TANGO 437 protein contains cytoplasmic domains at amino acid residues 1 to 84, 181 to 215, 313 to 435, and 487 to 505, the following seven transmembrane domains at amino acid residues 85 to 101, 156 to 180, 216 to 240, 288 to 312, 436 to 455, 467 to 486, and 506 to 523, and extracellular domains at amino acid residues 102 to 129, 241 to 287, 456 to 466, 524 to 591 of SEQ ID NO: 160.

[2041] TANGO 437-form 2 protein is a transmembrane protein that contains extracellular domains at about amino acid residues 1 to 84, 181 to 215, 313 to 435, 524 to 580, and 656 to 671, transmembrane domains at about amino acid residues 85 to 101, 130 to 149, 156 to 180, 216 to 240, 288 to 312, 436 to 455, 467 to 486, 506 to 523, 581 to 601, 639 to 655, and 672 to 694, and cytoplasmic domains at about amino acid residues 102 to 155, 241 to 287, 456 to 505, 602 to 638, and 695 to 752 of SEQ ID NO: 164.

[2042] Alternatively, TANGO 437-form 2 protein contains cytoplasmic domains at about amino acid residues 1 to 84, 181 to 215, 313 to 435, 524 to 580, and 656 to 671, transmembrane domains at about amino acid residues 85 to 101, 130 to 149, 156 to 180, 216 to 240, 288 to 312, 436 to 455, 467 to 486, 506 to 523, 581 to 601, 639 to 655, and 672 to 694, and extracellular domains at about amino acid residues 102 to 155, 241 to 287, 456 to 505, 602 to 638, and 695 to 752.

[2043] In one embodiment the sequence of human TANGO 437 and human TANGO 437-form 2 open reading frames (SEQ ID NOs: 160 and 164, respectively) have a nucleotide at position 5 which is cytosine (C). In this embodiment, the cDNA contains an open reading frame encoding a polypeptide having an amino acid at position 2 that is alanine (A). In an alternative embodiment, a species variant cDNA sequence of human TANGO 437 has a nucleotide at position 5 which is thymidine (T). In this embodiment, the cDNA contains an open reading frame encoding a polypeptide having an amino acid at position 2 that is valine (V), i.e., a conservative substitution.

[2044] In one embodiment the sequence of human TANGO 437 and human TANGO 437-form 2 open reading frames (SEQ ID NOs: 160 and 164, respectively) have a nucleotide at position 9 which is adenine (A). In this embodiment, the cDNA contains an open reading frame encoding a polypeptide having an amino acid at position 3 that is glutamate (E). In an alternative embodiment, a species variant cDNA sequence of human TANGO 437 has a nucleotide at position 9 which is cytosine (C). In this embodiment, the cDNA contains an open reading frame encoding a polypeptide having an amino acid at position 3 that is aspartate (D), i.e., a conservative substitution.

[2045] In one embodiment the sequence of human TANGO 437 and human TANGO 437-form 2 open reading frames (SEQ ID NOs: 160 and 164, respectively) have a nucleotide at position 86 which is adenine (A). In this embodiment, the cDNA contains an open reading frame encoding a polypeptide having an amino acid at position 29 that is tyrosine (Y). In an alternative embodiment, a species variant cDNA sequence of human TANGO 437 has a nucleotide at position 86 which is thymidine (T). In this embodiment, the cDNA contains an open reading frame encoding a polypeptide having an amino acid at position 29 that is phenylalanine (F), i.e., a conservative substitution.

[2046] In one embodiment the sequence of human TANGO 437 and human TANGO 437-form 2 open reading frames (SEQ ID NOs: 160 and 164, respectively) have a nucleotide at position 746 which is guanine (G). In this embodiment, the cDNA contains an open reading frame encoding a polypeptide having an amino acid at position 249 that is arginine (R). In an alternative embodiment, a species variant cDNA sequence of human TANGO 437 has a nucleotide at position 746 which is adenine (A). In this embodiment, the cDNA contains an open reading frame encoding a polypeptide having an amino acid at position 249 that is lysine (K), i.e., a conservative substitution.

[2047] Secretion assays indicate that the polypeptide encoded human TANGO 437 is not secreted and thus, a transmembrane protein. The secretion assays were performed as follows: 8×10⁵ 293T cells were plated per well in a 6-well plate and the cells were incubated in growth medium (DMEM, 10% fetal bovine serum, penicillin/strepomycin) at 37° C., 5% CO₂ overnight. 293T cells were transfected with 2 jig of full-length TANGO 437 inserted in the pMET7 vector/well and 10 μg LipofectAMINE (GIBCO/BRL Cat. #18324-012)/well according to the protocol for GIBCO/BRL LipofectAMINE. The transfectant was removed 5 hours later and fresh growth medium was added to allow the cells to recover overnight. The medium was removed and each well was gently washed twice with DMEM without methionine and cysteine (ICN Cat. #16-424-54). 1 ml DMEM without methionine and cysteine with 50 μCi Trans-³⁵S (ICN Cat. #51006) was added to each well and the cells were incubated at 37° C., 5% CO₂ for the appropriate time period. A 150 μl aliquot of conditioned medium was obtained and 150 μl of 2× SDS sample buffer was added to the aliquot. The sample was heat-inactivated and loaded on a 4-20% SDS-PAGE gel. The gel was fixed and the presence of secreted protein was detected by autoradiography.

[2048] Human TANGO 437 includes an ion transport protein-like domain at amino acids 82 to 311 and a putative perniease-like domain at amino acids 284 to 591 of SEQ ID NO: 160.

[2049] Human TANGO 437 has an N-glycosylation sites with the sequence NSSM (at amino acid residues 198 to 201). Five protein kinase C phosphorylation sites are present in TANGO 437. The first has the sequence TYR (at amino acid residues 28 to 30), the second has the sequence SVK (at amino acid residues 141 to 143), the third has the sequence TLK (at amino acid residues 205 to 207), the fourth has the sequence SHR (at amino acid residues 374 to 376), and the fifth has the sequence SMK (at amino acid residues 561 to 563). TANGO 437 has five casein II kinase phosphorylation sites. The first has the sequence STAD (at amino acid residues 107 to 110), the second has the sequence SLVD (at amino acid residues 168 to 171), the third has the sequence SLPE (at amino acid residues 212 to 215), the fourth has the sequence SAEE (at amino acid residues 392 to 395), and the fifth has the sequence SLWD (at amino acid residues 539 to 542).

[2050] Seven N-myristylation sites are present in TANGO 437. The first has the sequence GGARGG (at amino acid residues 13 to 18), the second has the sequence GLTESV (at amino acid residues 123 to 128), the third has the sequence GLLLAI (at amino acid residues 220 to 225), the fourth has the sequence GTRAAF (at amino acid residues 333 to 338), the fifth has the sequence GNLIAL (at amino acid residues 438 to 443), the sixth has the sequence GILNCV (at amino acid residues 470 to 475), and the seventh has the sequence GLVQNM (at amino acid residues 574 to 579).

[2051] Human TANGO 437-form 2 includes an ion transport protein-like domain at amino acids 82 to 311 and a putative permease-like domain at amino acids 284 to 591 of SEQ ID NO: 164.

[2052] Human TANGO 437-form 2 has at least one or more of the following post-translational sites: predicted N-glycosylation sites from about amino acids 198-201, 611-614, and 618-621 of SEQ ID NO: 164; predicted cAMP- and cGMP-dependent protein kinase phosphorylation site from about amino acids 663-666 of SEQ ID NO: 164; predicted protein kinase C phosphorylation sites from about amino acids 28-30, 141-143, 205-207, 374-376, 561-563, and 739-741 of SEQ ID NO: 164; predicted casein II kinase phosphorylation sites from about amino acids 107-110, 168-171, 212-215, 392-395, and 539-542 of SEQ ID NO: 164; predicted N-myristylation sites from about amino acids 13-18, 123-128, 220-225, 333-338, 438-443, 470-475, 574-579, 603-608, 619-624, and 712-717 of SEQ ID NO: 164.

[2053] FIGS. 257A-257B depicts a local alignment of the nucleotide sequence of human TANGO 437 and Gene 100 published in PCT Application No. WO98/39448 (V59610). Nucleic acids 101 to 798 of the nucleotide sequence of the coding region of human TANGO 437 and nucleic acids 1 to 573 of the nucleotide sequence of Gene 100 are 54.6% identical. Nucleic acids 1851 to 3679 of the full-length nucleotide sequence of TANGO 437 and nucleic acids 1 to 1751 of the nucleotide sequence of Gene 100 are 74.1% identical.

[2054] Clone 437, which encodes human TANGO 437, was deposited with the American Type Culture Collection (10801 University Boulevard, Manassas, Va. 20110-2209) on Oct. 1, 1999 and assigned PTA-816. This deposit will be maintained under the terms of the Budapest Treaty on the International Recognition of the Deposit of Microorganisms for the Purposes of Patent Procedure. This deposit was made merely as a convenience for those of skill in the art and is not an admission that a deposit is required under 35 U.S.C. §112.

[2055] Uses of TANGO 437 Nucleic Acids, Polypeptides, and Modulators Thereof

[2056] As TANGO 437 was originally found in a mixed lymphocyte reaction cell library, TANGO 437 nucleic acids, proteins, and modulators thereof can be used to track and/or modulate the proliferation, development, maturation, differentiation, activity and/or function of immune cells, e.g. B-cells, dendritic cells, natural killer cells and monocytes, and/or immune function. TANGO 437 nucleic acids, proteins and modulators thereof can be utilized to track and/or modulate immune-related processes such as the host immune response. For example, TANGO 437 nucleic acids, proteins, and modulators thereof can be used to modulate the host immune response by modulating the formation of and/or binding to immune complexes, detection and defense against surface antigens and bacteria, and immune surveillance for rapid removal or pathogens.

[2057] TANGO 437 has significant homology with Gene 100, which is expressed primarily in hepatocellular tumors and encodes a secreted human protein. As such, TANGO 437 nucleic acids, proteins and modulators thereof can be used to diagnose, monitor, modulate and/or treat hepatic (liver) disorders, such as jaundice, hepatic failure, hereditary hyperbiliruinemias (e.g., Gilbert's syndrome, Crigler-Naijar syndromes and Dubin-Johnson and Rotor's syndromes), hepatic circulatory disorders (e.g., hepatic vein thrombosis and portal vein obstruction and thrombosis) hepatitis (e.g., chronic active hepatitis, acute viral hepatitis, and toxic and drug-induced hepatitis) cirrhosis (e.g., alcoholic cirrhosis, biliary cirrhosis, and hemochromatosis), or malignant tumors (e.g., primary carcinoma, hepatoblastoma, and angiosarcoma).

[2058] TANGO 437 nucleic acids, proteins and modulators thereof can be utilized to diagnose, monitor, modulate and/or treat immune disorders that include, but are not limited to, immune proliferative disorders (e.g., carcinoma, lymphoma, e.g., follicular lymphoma), and disorders associated with fighting pathogenic infections, (e.g. bacterial (e.g., chlamydia) infection, parasitic infection, and viral infection (e.g. HSV or HIV infection)), and pathogenic disorders (e.g., immunodeficiency disorders, such as HIV), autoimmune disorders, such as arthritis, graft rejection (e.g., allograft rejection), multiple sclerosis, Grave's disease, or Hashimoto's disease, T cell disorders (e.g., AIDS) and inflammatory disorders, such as septicemia, cerebral malaria, inflammatory bowel disease, arthritis (e.g., rheumatoid arthritis, osteoarthritis), and allergic inflammatory disorders (e.g., asthma, psoriasis), apoptotic disorders (e.g., rheumatoid arthritis, systemic lupus erythematosus, insulin-dependent diabetes mellitus), cytotoxic disorders, septic shock, and cachexia.

[2059] TANGO 437 nucleic acids, proteins and modulators thereof can be utilized to track and/or modulate intracellular signaling. TANGO 437 nucleic acids, proteins and modulators thereof can also be utilized to track and/or modulate immune activation. For example, antagonists to TANGO 437 action, such as peptides, antibodies or small molecules that decrease or block TANGO 437 activity, e.g., binding to extracellular matrix components, e.g., integrins, or that prevent TANGO 437 signaling, can be used as immune system activation blockers. In another example, agonists that mimic or partially mimic TANGO 437 activity, such as peptides, antibodies or small molecules, can be used to induce immune system activation. Antibodies may activate or inhibit the cell adhesion, proliferation and activation, and may help in treating infection, autoimmunity, inflammation, and cancer by affecting these cellular processes. Further, TANGO 437 nucleic acids, proteins and modulators thereof can be utilized to track and/or modulate intercellular signaling in the immune system, e.g., modulate intercellular signal transduction in immune stimulation or suppression and modulate immune cell membrane adhesion to ECM components, during development, e.g., late stages of development.

[2060] As TANGO 437 contains an ion transport protein domain, TANGO 437 nucleic acids, proteins and modulators thereof can be used track and/or modulate ion transport (e.g., sodium, calcium or potassium transport). TANGO 437 nucleic acids, proteins and modulators thereof can be utilized to diagnose, monitor, modulate and/or treat disorders associated with aberrant ion transport. Examples of such disorders include, but are not limited to, pulmonary disorders (e.g., cystic fibrosis) and renal disorders.

[2061] As TANGO 437 contains a cell cycle protein-like domain, TANGO 437 nucleic acids, proteins and modulators thereof can be used track and/or modulate cell cycle e.g., cell cycle progression. TANGO 437 nucleic acids, proteins and modulators thereof can, for example, be used diagnose, monitor, modulate and/or treat disorders associated with aberrant cell cycle progression including various types of cancer. Examples of types of cancers include benign tumors, neoplasms or tumors (such as carcinomas, sarcomas, adenomas or myeloid lymphoma tumors, e.g., fibrosarcoma, myxosarcoma, liposarcoma, chondrosarcoma, osteogenic sarcoma, chordoma, angiosarcoma, endotheliosarcoma, lymphangiosarcoma, lymphangioendotheliosarcoma, synovioma, mesothelioma, Ewing's tumor, leimyosarcoma, rhabdotheliosarcoma, colon sarcoma, pancreatic cancer, breast cancer, ovarian cancer, prostate cancer, squamous cell carcinoma, basal cell carcinoma, adenocarcinoma, sweat gland carcinoma, sebaceous gland carcinoma, papillary carcinoma, papillary adenocarcinomas, cystadenocarcinoma, medullary carcinoma, bronchogenic carcinoma, renal cell carcinoma, hematoma, bile duct carcinoma, melanoma, choriocarcinoma, semicoma, embryonal carcinoma, Wilms' tumor, cervical cancer, testicular tumor, lung carcinoma, small cell carcinoma, bladder carcinoma, epithelial carcinoma, glioma, astrocytoma, medulloblastoma, craniopharyngioma, ependynoma, pinealoma, hemangioblastoma, retinoblastoma), leukemias (e.g. acute lymphocytic leukemia), acute myelocytic leukemia (myelolastic, promyelocytic, myelomonocytic, monocytic and erythroleukemia), chronic leukemias (chronic myelocytic (granulocytic) leukemia and chronic lymphocytic leukemia), polycythemia vera, lymphomas (Hodgkin's disease and non-Hodgkin's diseases), multiple myelomas and Waldrenström's macroglobulinemia.

[2062] TANGO 437 nucleic acids and/or proteins can be utilized as markers for immune cells (e.g., T cells, B cells, natural killer cells, mast cells, and dendritic cells). Further, TANGO 437 nucleic acids can be utilized for chromosomal mapping, or as chromosomal markers, e.g., in radiation hybrid mapping.

[2063] Human TANGO 480

[2064] A cDNA encoding human TANGO 480 was identified by analyzing the sequences of clones present in a human keratinocyte library for sequences that encode wholly secreted or transmembrane proteins. This analysis led to the identification of a clone, jthka173a09, encoding full-length human TANGO 480. The human TANGO 480 cDNA of this clone is 1912 nucleotides long (FIGS. 258A-258B; SEQ ID NO: 161). The open reading frame of this cDNA, nucleotides 43 to 621, encodes a 193 amino acid transmembrane protein (SEQ ID NO: 162).

[2065] FIG. 259 depicts a hydropathy plot of human TANGO 480.

[2066] The signal peptide prediction program SIGNALP (Nielsen et al., 1997, Protein Engineering 10:1-6) predicted that human TANGO 480 includes a 19 amino acid signal peptide (amino acid 1 to amino acid 19 of SEQ ID NO: 162) preceding the mature TANGO 480 protein corresponding to amino acid 20 to amino acid 193. The molecular weight of a TANGO 480 protein without post-translational modification is 22.0 kDa, and after cleavage of the signal peptide the molecular weight of TANGO 480 is 19.9 kDa.

[2067] Human TANGO 480 protein is a transmembrane protein that contains extracellular domains at amino acid residues 20 to 56 and 113 to 127, transmembrane domains at amino acid residues 55 to 74, 88 to 112, and 128 to 150, and cytoplasmic domains at amino acid residues 75 to 87 and 151 to 193 of SEQ ID NO: 162.

[2068] In instances wherein the signal peptide is not cleaved, a human TANGO 480 protein is a transmembrane protein that contains extracellular domains at amino acid residues 1 to 56 and 113 to 127, transmembrane domains at amino acid residues 55 to 74, 88 to 112, and 128 to 150, and cytoplasmic domains at amino acid residues 75 to 87 and 151 to 193 of SEQ ID NO: 162.

[2069] Alternatively, in another embodiment, a human TANGO 480 protein is a transmembrane protein that contains cytoplasmic domains at amino acid residues 20 to 56 and 113 to 127, transmembrane domains at amino acid residues 55 to 74, 88 to 112, and 128 to 150, and extracellular domains at amino acid residues 75 to 87 and 151 to 193 of SEQ ID NO: 162.

[2070] In one embodiment a cDNA sequence of human TANGO 480 has a nucleotide at position 7 which is adenine (A). In this embodiment, the cDNA contains an open reading frame encoding a polypeptide having an amino acid at position 3 that is isoleucine (I). In an alternative embodiment, a species variant cDNA sequence of human TANGO 480 has a nucleotide at position 7 which is guanine (G). In this embodiment, the cDNA contains an open reading frame encoding a polypeptide having an amino acid at position 3 that is valine (V), i.e., a conservative substitution.

[2071] In another embodiment a cDNA sequence of human TANGO 480 has a nucleotide at position 11 which is thymidine (T). In this embodiment, the cDNA contains an open reading frame encoding a polypeptide having an amino acid at position 4 that is phenylalanine (F). In an alternative embodiment, a species variant cDNA sequence of human TANGO 480 has a nucleotide at position 11 which is adenine (A). In this embodiment, the cDNA contains an open reading frame encoding a polypeptide having an amino acid at position 4 that is tyrosine (Y), i.e., a conservative substitution.

[2072] In another embodiment a cDNA sequence of human TANGO 480 has a nucleotide at position 13 which is guanine (G). In this embodiment, the cDNA contains an open reading frame encoding a polypeptide having an amino acid at position 5 that is aspartate (D). In an alternative embodiment, a species variant cDNA sequence of human TANGO 480 has a nucleotide at position 13 which is adenine (A). In this embodiment, the cDNA contains an open reading frame encoding a polypeptide having an amino acid at position 5 that is asparagine (N), i.e., a conservative substitution.

[2073] In another embodiment a cDNA sequence of human TANGO 480 has a nucleotide at position 389 which is guanine (G). In this embodiment, the cDNA contains an open reading frame encoding a polypeptide having an amino acid at position 13 that is arginine (R). In an alternative embodiment, a species variant cDNA sequence of human TANGO 480 has a nucleotide at position 389 which is adenine (A). In this embodiment, the cDNA contains an open reading frame encoding a polypeptide having an amino acid at position 130 that is lysine (K), i.e., a conservative substitution.

[2074] Secretion assays indicate that the polypeptide encoded by human TANGO 480 is not secreted and thus, likely a transmembrane protein. The secretion assays were performed as follows: 8×10⁵ 293T cells were plated per well in a 6-well plate and the cells were incubated in growth medium (DMEM, 10% fetal bovine serum, penicillin/strepomycin) at 37° C., 5% CO₂ overnight. 293T cells were transfected with 2 μg of full-length TANGO 480 inserted in the pMET7 vector/well and 10 μg LipofectAMINE (GIBCO/BRL Cat. #18324-012)/well according to the protocol for GIBCO/BRL LipofectAMINE. The transfectant was removed 5 hours later and fresh growth medium was added to allow the cells to recover overnight. The medium was removed and each well was gently washed twice with DMEM without methionine and cysteine (ICN Cat. #16-424-54). Next, 1 ml DMEM without methionine and cysteine with 50 gCi Trans-³⁵S (ICN Cat. #51006) was added to each well and the cells were incubated at 37° C., 5% CO₂ for the appropriate time period. A 150 μl aliquot of conditioned medium was obtained and 150 μl of 2× SDS sample buffer was added to the aliquot. The sample was heat-inactivated and loaded on a 4-20% SDS-PAGE gel. The gel was fixed and the presence of secreted protein was detected by autoradiography.

[2075] Human TANGO 480 has two casein II kinase phosphorylation sites. The first has the sequence SVSD (at amino acid residues 46 to 49) and the second has the sequence TSYD (at amino acid residues 84 to 87).

[2076] Clone 480, which encodes human TANGO 480, was deposited with the American Type Culture Collection (10801 University Boulevard, Manassas, Va. 20110-2209) on Oct. 1, 1999 and assigned PTA-816. This deposit will be maintained under the terms of the Budapest Treaty on the International Recognition of the Deposit of Microorganisms for the Purposes of Patent Procedure. This deposit was made merely as a convenience for those of skill in the art and is not an admission that a deposit is required under 35 U.S.C. §112.

[2077] Uses of TANGO 480 Nucleic Acids, Polypeptides, and Modulators Thereof

[2078] As TANGO 480 was originally found in a human keratinocyte library, TANGO 480 nucleic acids, proteins, and modulators thereof can be used to track and/or modulate the proliferation, development, maturation, differentiation, activity and/or function of keratinocytes. TANGO 480 nucleic acids, proteins, and modulators thereof can be utilized to track and/or modulate keratinocyte-related processes. TANGO 480 nucleic acids, proteins and modulators thereof can be utilized to diagnose, monitor, modulate and/or treat keratinocyte disorders that include, but are not limited to, keratinocyte proliferative disorders (e.g., squamous cell carcinoma), keratitis, keratoacanthoma, keratoconjunctivitis, keratoconus, keratoderma blennorrhagica, keratomalacia, keratopathy, keratinous cysts, and keratosis.

[2079] Keratinocyte growth factor (KGF) is a fibroblast growth factor that acts specifically on epithelial cells in a paracrine mode and mediates epithelial growth and differentiation. TANGO 480 nucleic acids, proteins, and modulators thereof may thus be used to track and/or modulate the activity of human keratinocyte (HKc) growth and/or differentiation.

[2080] Since high affinity muscarinic acetylcholine receptors (mAChR) have been found on keratinocyte cell surfaces at high density, TANGO 480 nucleic acids, proteins, and modulators thereof can be used to track and/or modulate the activity of such muscarinic acetylcholine receptors.

[2081] TANGO 480 nucleic acids, proteins, and modulators thereof can be used to modulate the activity of the cell cycle arrest program which is activated by TGF-beta in human keratinocytes.

[2082] TANGO 480 nucleic acids, proteins, and modulators thereof can be used to track and/or modulate the activity of the calcium sensing receptor (CaR) in keratinocytes which may be involved in the signaling of calcium-induced differentiation.

[2083] TANGO 480 nucleic acids, proteins, and modulators thereof can be used to track and/or modulate the activity of the GlcCer synthase (GCS) which is up-regulated at the transcriptional level during keratinocyte differentiation.

[2084] TANGO 480 nucleic acids, proteins, and modulators thereof can be used to track and/or modulate the activity of the cyclic AMP phosphodiesterase (PDE) type 4 PDE isogenes which are expressed in keratinocytes to a different degree, the expression of each of which is modulated by intracellular levels of cAMP.

[2085] Platelet-derived growth factor (PDGF) can promote tumor growth by inducing angiogenesis and stroma formation. Thus, TANGO 480 nucleic acids, proteins, and modulators thereof may be used to track and/or modulate the activity of PDGF, a major factor activated in wound healing.

[2086] TANGO 480 nucleic acids, proteins and modulators thereof can be utilized to track to and/or modulate intracellular signaling. TANGO 480 nucleic acids, proteins and modulators thereof can also be utilized to track and/or modulate keratinocyte activity and/or function. For example, antagonists to TANGO 480 action, such as peptides, antibodies or small molecules that decrease or block TANGO 480 activity, e.g., binding to extracellular matrix components, e.g., integrins, or that prevent TANGO 480 signaling, can be used as keratinocyte activation blockers. In another example, agonists that mimic or partially mimic TANGO 480 activity, such as peptides, antibodies or small molecules, can be used to induce keratinocyte activation. Antibodies may activate or inhibit the cell adhesion, proliferation and activation, and may help in treating keratinocyte associated disorders by affecting these cellular processes. Further, TANGO 480 nucleic acids, proteins and modulators thereof can be utilized to track and/or modulate intercellular signaling between keratinocytes.

[2087] TANGO 480 nucleic acids and/or proteins can be utilized as markers for keratinocytes. Further, TANGO 480 nucleic acids can be utilized for chromosomal mapping, or as chromosomal markers, e.g., in radiation hybrid mapping.

TABLE 1
Summary of Nucleotide Sequence Information of INTERCEPT 258,
INTERCEPT 307 and INTERCEPT 340, MANGO 003, MANGO 245, MANGO 346,
MANGO 347, MANGO 349, and MANGO 511, and TANGO 128, TANGO 136, TANGO
140, TANGO 176, TANGO 197, TANGO 201, TANGO 204, TANGO 206, TANGO 209,
TANGO 212, TANGO 213, TANGO 214, TANGO 216, TANGO 221, TANGO 222,
TANGO 223, TANGO 224, TANGO 244, TANGO 246, TANGO 253, TANGO 257,
TANGO 261, TANGO 262, TANGO 266, TANGO 267, TANGO 272, TANGO 275,
TANGO 295, TANGO 315, TANGO 330, TANGO 339, TANGO 354, TANGO 358,
TANGO 361, TANGO 365, TANGO 368, TANGO 369, TANGO 378, TANGO 383,
TANGO 437, TANGO 480, and TANGO 499 Nucleic Acids.

[2088]

| GENE FIGURE | (OPEN READING FRAME) | |
|---|---|---|
| and cDNA | POLYPEPTIDE ATCC ACCESSION NUMBER | |
| m TANGO 136 | FIG. 1 (89-1813 b.p.) | |
| 1813 base pair (b.p.); | | |
| SEQ ID NO:1 | 575 amino acids (a.a.); | |
| SEQ ID NO:2 | | |
| h TANGO 136 | FIG. 3 (541-2679 b.p.) | |
| 2679 b.p.; | | |
| SEQ ID NO:3 | 713 a.a.; | |
| SEQ ID NO:4 | 98880 | |
| h TANGO 128 | FIG. 11 (289-1325 b.p.) | |
| 2839 b.p.; | | |
| SEQ ID NO:5 | 345 a.a.; | |
| SEQ ID NO:6 | 98999 | |
| h TANGO 140-1 | FIG. 12 (2-619 b.p.) | |
| 1550 b.p.; | | |
| SEQ ID NO:7 | 206 a.a.; | |
| SEQ ID NO:8 | 98999 | |
| h TANGO 140-2 | FIG. 13 (1-594 b.p.) | |
| 3385 b.p.; | | |
| SEQ ID NO:9 | 198 a.a.; | |
| SEQ ID NO:10 | | |
| h TANGO 197 | FIG. 14 (213-1214 b.p.) | |
| 2272 b.p.; | | |
| SEQ ID NO:11 | 333 a.a.; | |
| SEQ ID NO:12 | 98999 | |
| h TANGO 212 | FIG. 15 (269-1930 b.p.) | |
| 2435 b.p.; | | |
| SEQ ID NO;13 | 553 a.a.; | |
| SEQ ID NO:14 | 202171 | |
| h TANGO 213 | FIG. 16 (58-873 b.p.) | |
| 1496 b.p.; | | |
| SEQ ID NO:15 | 271 a.a.; | |
| SEQ ID NO:16 | 98965 | |
| h TANGO 224. | | |
| | | form 1 FIG. 17 (67-1443 b.p.) |
| 2689 b.p.; | | |
| SEQ ID NO:17 | 480 a.a.; | |
| SEQ ID NO:18 | 98966 | |
| h TANGO 224, | | |
| | | form 2 FIG. 37 (67-2690 b.p.) |
| 2691 b.p.; | | |
| SEQ ID NO:19 | 874 a.a.; | |
| SEQ ID NO:20 | | |
| m TANGO 128 | FIG. 33 (211-750 b.p.) | |
| 764 b.p.; | | |
| SEQ ID NO:21 | 179 a.a.; | |
| SEQ ID NO:22 | | |
| m TANGO 197 | FIG. 34 (3-1145 b.p.) | |
| 4417 b.p.; | | |
| SEQ ID NO:23 | 381 a.a.; | |
| SEQ ID NO:24 | | |
| m TANGO 212 | FIG. 35 (180-1179 b.p.) | |
| 1180 b.p.; | | |
| SEQ ID NO:25 | 334 a.a.; | |
| SEQ ID NO:26 | | |
| m TANGO 213 | FIG. 36 (41-616 b.p.) | |
| 2154 b.p.; | | |
| SEQ ID NO 27: | 192 a.a.; | |
| SEQ ID NO:28 | | |
| rat TANGO 213 | FIG. 38 (FIG. 38 b.p.) | |
| 455 b.p.; | | |
| SEQ ID NO:29 | ; | |
| SEQ ID NO:30 | | |
| h TANGO 214 | | |
| | | (HtrA-2) |
| | FIG. 39 (222-1580 b.p.) | |
| 2577 b.p.; | | |
| SEQ ID NO:31 | 453 a.a.; | |
| SEQ ID NO:32 | 98899 | |
| m TANGO 214 | | |
| | | (HtrA-2) FIG. 44 (268-1311 b.p.) |
| 1563 b.p.; | | |
| SEQ ID NO:33 | 349 a.a.; | |
| SEQ ID NO:34 | | |
| h TANGO 221 | FIG. 45 (6-716 b.p.) | |
| 1061 b.p.; | | |
| SEQ ID NO:35 | 237 a.a.; | |
| SEQ ID NO:36 | 207044 | |
| h TANGO 222 | FIG. 47 (33-434 b.p.) | |
| 745 b.p.; | | |
| SEQ ID NO:37 | 134 a.a.; | |
| SEQ ID NO:38 | 207043 | |
| h TANGO 176 | FIG. 49 (101-1528 b.p.) | |
| 16976 b.p.; | | |
| SEQ ID NO:39 | 476 a.a.; | |
| SEQ ID NO:40 | 207042 | |
| m TANGO 176 | FIG. 51 (49-1524 b.p.) | |
| 1904; | | |
| SEQ ID NO:41 | 492 a.a.; | |
| SEQ ID NO:42 | | |
| m TANGO 201 | FIG. 52 (60-1508 b.p.) | |
| 1758 b.p.; | | |
| SEQ ID NO: | 483 a.a.; | |
| SEQ ID NO:44 | | |
| h TANGO 201 | FIG. 54 (179-1387 b.p.) | |
| 2252 b.p.; | | |
| SEQ ID NO:45 | 403 a.a.; | |
| SEQ ID NO:46 | 207081 | |
| h TANGO 223 | FIG. 59 (30-770 b.p.) | |
| 1473 b.p.; | | |
| SEQ ID NO:47 | 247 a.a.; | |
| SEQ ID NO:48 | 207081 | |
| m TANGO 223 | FIG. 62 (5-694 b.p.) | |
| 854 b.p.; | | |
| SEQ ID NO:49 | 230 a.a.; | |
| SEQ ID NO:50 | | |
| h TANGO 216 | FIG. 63 (307-1770 b.p.) | |
| 3677 b.p.; | | |
| SEQ ID NO:51 | 488 a.a.; | |
| SEQ ID NO 52: | 207176 | |
| m TANGO 216 | FIG. 64 (149-1609 b.p.) | |
| 3501 b.p.; | | |
| SEQ ID NO:53 | 487 a.a.; | |
| SEQ ID NO:54 | | |
| h TANGO 261 | FIG. 67 (6-761 b.p.) | |
| 969 b.p.; | | |
| SEQ ID NO:55 | 252 a.a.; | |
| SEQ ID NO:56 | 207176 | |
| m TANGO 261 | FIG. 68 (2-652 b.p.) | |
| 1713 b.p.; | | |
| SEQ ID NO:57 | 217 a.a.; | |
| SEQ ID NO:58 | | |
| h TANGO 262 | FIG. 71 (322-999 b.p.) | |
| 1682 b.p.; | | |
| SEQ ID NO:59 | 226 a.a.; | |
| SEQ ID NO:60 | 207176 | |
| m TANGO 262 | FIG. 72 (89-766 b.p.) | |
| 1415 b.p.; | | |
| SEQ ID NO:61 | 226 a.a.; | |
| SEQ ID NO:62 | | |
| h TANGO 266 | FIG. 76 (49-363 b.p.) | |
| 1422 b.p.; | | |
| SEQ ID NO:63 | 105 a.a.; | |
| SEQ ID NO:64 | 207176 | |
| h TANGO 267 | FIG. 79 (161-2494 b.p.) | |
| 2925 b.p.; | | |
| SEQ ID NO:65 | 778 a.a.; | |
| SEQ ID NO:66 | 207176 | |
| h TANGO 253 | FIG. 84 (188-916 b.p.) | |
| 1339 b.p.; | | |
| SEQ ID NO:67 | 243 a.a.; | |
| SEQ ID NO:68 | 207222 | |
| m TANGO 253 | FIG. 86 (135-863 b.p.) | |
| 1263 b.p.; | | |
| SEQ ID NO:69 | 406 a.a.; | |
| SEQ ID NO:70 | 207215 | |
| h TANGO 257 | FIG. 92 (88-1305 b.p.) | |
| 1832 b.p.; | | |
| SEQ ID NO:71 | 406 a.a.; | |
| SEQ ID NO:72 | 207222 | |
| m TANGO 257 | FIG. 94 (31-1248 b.p.) | |
| 1721 b.p.; | | |
| SEQ ID NO:73 | 370 a.a.; | |
| SEQ ID NO:74 | 207217 | |
| h INTERCEPT 258 | FIG. 101 (153-1262 b.p.) | |
| 1869 b.p.; | | |
| SEQ ID NO:75 | 370 a.a.; | |
| SEQ ID NO:76 | 207222 | |
| m INTERCEPT 258 | FIG. 103 (107-1288 b.p.) | |
| 1846 b.p.; | | |
| SEQ ID NO:77 | 394 a.a.; | |
| SEQ ID NO:78 | 207221 | |
| h TANGO 204 | FIG. 111 (99-890 b.p.) | |
| 3057 b.p.; | | |
| SEQ ID NO:79 | 264 a.a.; | |
| SEQ ID NO:80 | 207192 | |
| m TANGO 204 | FIG. 115 (81-872 b.p.) | |
| 1294 b.p.; | | |
| SEQ ID NO:81 | 264 a.a.; | |
| SEQ ID NO:82 | 207189 | |
| h TANGO 206 | FIG. 118 (99-1358 b.p.) | |
| 1840 b.p.; | | |
| SEQ ID NO:83 | 420 a.a.; | |
| SEQ ID NO:84 | 207223 | |
| m TANGO 206 | FIG. 121 (332-1591 b.p.) | |
| 2093 b.p.; | | |
| SEQ ID NO:85 | 420 a.a.; | |
| SEQ ID NO:86 | 207221 | |
| h TANGO 209 | FIG. 124 (194-1531 b.p.) | |
| 3117; | | |
| SEQ ID NO:87 | 446 a.a.; | |
| SEQ ID NO:88 | 207223 | |
| m TANGO 209 | FIG. 128 (187-1527 b.p.) | |
| 2810 b.p.; | | |
| SEQ ID NO:89 | 447 a.a.; | |
| SEQ ID NO:90 | 207221 | |
| h TANGO 244 | FIG. 131 (85-570 b.p.) | |
| 1513 b.p.; | | |
| SEQ ID NO:91 | 162 a.a.; | |
| SEQ ID NO:92 | 207223 | |
| h TANGO 246 | FIG. 135 (94-1080 b.p.) | |
| 1992 b.p.; | | |
| SEQ ID NO:93 | 329 a.a.; | |
| SEQ ID NO:94 | 207223 | |
| h TANGO 275 | FIG. 139 (23-3931 b.p.) | |
| 4225 b.p.; | | |
| SEQ ID NO:95 | 1289 a.a.; | |
| SEQ ID NO:96 | 207220 | |
| m TANGO 275 | FIG. 146 (157-3916 b.p.) | |
| 4376 b.p.; | | |
| SEQ ID NO:97 | 1253 a.a.; | |
| SEQ ID NO:98 | | |
| h MANGO 245 | FIG. 147 (105-1148 b.p.) | |
| 1356 b.p.; | | |
| SEQ ID NO:99 | 348 a.a.; | |
| SEQ ID NO:100 | 207223 | |
| monkey | | |
| MANGO 245 | FIG. 149 (250-1236 b.p.) | |
| 1416 b.p.; | | |
| SEQ ID NO:101 | 329 a.a.; | |
| SEQ ID NO:102 | | |
| m MANGO 245 | FIG. 153 (29-625 b.p.) | |
| 625 b.p.; | | |
| SEQ ID NO:103 | 307 a.a.; | |
| SEQ ID NO:104 | | |
| h INTERCEPT 340 | FIG. 157 (1222-1944 b.p.) | |
| 3284 b.p.; | | |
| SEQ ID NO:105 | 241 a.a.; | |
| SEQ ID NO:106 | PTA-250 | |
| h MANGO 003 | FIG. 160 (57-1568 b.p.) | |
| 3169 b.p.; | | |
| SEQ ID NO:107 | 504 a.a.; | |
| SEQ ID NO:108 | 207178 | |
| m MANGO 003 | FIG. 164 (1-626 b.p.) | |
| 626 b.p.; | | |
| SEQ ID NO:109 | 208 a.a.; | |
| SEQ ID NO:110 | | |
| h MANGO 347 | FIG. 166 (31-444 b.p.) | |
| 1423 b.p.; | | |
| SEQ ID NO:111 | 138 a.a.; | |
| SEQ ID NO:112 | PTA-250 | |
| h TANGO 272 | FIG. 169 (230-3379 b.p.) | |
| 5036 b.p.; | | |
| SEQ ID NO:113 | 1050 a.a.; | |
| SEQ ID NO:114 | PTA 250 | |
| m TANGO 272 | FIG. 172 (1—1492 b.p.) | |
| 2569 b.p.; | | |
| SEQ ID NO:115 | 497 a.a.; | |
| SEQ ID NO:116 | | |
| h TANGO 295 | FIG. 174 (217-684 b.p.) | |
| 1497; | | |
| SEQ ID NO:117 | 156 a.a.; | |
| SEQ ID NO:118 | PTA-249 | |
| h TANGO 354 | FIG. 177 (62-976 b.p.) | |
| 1788 b.p.; | | |
| SEQ ID NO:119 | 305 a.a.; | |
| SEQ ID NO:120 | | |
| h TANGO 378 | FIG. 180 (42-1625 b.p.) | |
| 3258 b.p.; | | |
| SEQ ID NO:121 | 528 a.a.; | |
| SEQ ID NO:122 | | |
| rat TANGO 272 | FIG. 189 (925-2832 b.p.) | |
| 3567 b.p.; | | |
| SEQ ID NO:123 | 636 a.a.; | |
| SEQ ID NO:124 | | |
| h TANGO 339 | FIG. 198 (210-1019 b.p.) | |
| 2715 b.p.; | | |
| SEQ ID NO:125 | 270 a.a.; | |
| SEQ ID NO:126 | PTA-292 | |
| h TANGO 358 | FIG. 202 (184-429 b.p.) | |
| 1608 b.p.; | | |
| SEQ ID NO:127 | 82 a.a.; | |
| SEQ ID NO:128 | PTA-292 | |
| h TANGO 365 | FIG. 204 (56-550 b.p.) | |
| 1338 b.p.; | | |
| SEQ ID NO:129 | 165 a.a.; | |
| SEQ ID NO:130 | PTA-291 | |
| h TANGO 368 | FIG. 206 (152-328 b.p.) | |
| 983 b.p.; | | |
| SEQ ID NO:131 | 59 a.a.; | |
| SEQ ID NO:132 | PTA-291 | |
| h TANGO 369 | FIG. 209 (162-335 b.p.) | |
| 1119 b.p.; | | |
| SEQ ID NO:133 | 58 a.a.; | |
| SEQ ID NO:134 | PTA-295 | |
| h TANGO 383 | FIG. 211 (104-523 b.p.) | |
| 1386 b.p.; | | |
| SEQ ID NO:135 | 140 a.a.; | |
| SEQ ID NO:136 | PTA-295 | |
| h MANGO 346 | FIG. 214 (319-498 b.p.) | |
| 1196 b.p.; | | |
| SEQ ID NO:137 | 60 a.a.; | |
| SEQ ID NO:138 | PTA-291 | |
| h MANGO 349 | FIG. 216 (221-721 b.p.) | |
| 3649 b.p.; | | |
| SEQ ID NO:139 | 167 a.a.; | |
| SEQ ID NO:140 | PTA-295 | |
| h INTERCEPT 307 | FIG. 218 (45-1130 b.p.) | |
| 5058 b.p.; | | |
| SEQ ID NO:141 | 362 a.a.; | |
| SEQ ID NO:142 | PTA-455 | |
| h MANGO 511 | FIG. 224 (108-1004 b.p.) | |
| 1477 b.p.; | | |
| SEQ ID NO:143 | 299 a.a.; | |
| SEQ ID NO:144 | PTA-425 | |
| TANGO 361 | FIG. 228 (41-1309 b.p.) | |
| 5058 b.p.; | | |
| SEQ ID NO:145 | 423 a.a.; | |
| SEQ ID NO:146 | PTA-438 | |
| TANGO 499, | | |
| form 1, var. 1 | FIG. 230 (83-844 b.p.) | |
| 1106 b.p.; | | |
| SEQ ID NO:147 | 254 a.a.; | |
| SEQ ID NO:148 | PTA-455 | |
| TANGO 499, | | |
| form 2, var. 3 | FIG. 234 (144-830 b.p.) | |
| 1085 b.p.; | | |
| SEQ ID NO:149 | 229 a.a.; | |
| SEQ ID NO:150 | PTA-454 | |
| h TANGO 315, form 1 | FIG. 237 (1-888 b.p.) | |
| 1463 b.p.; | | |
| SEQ ID NO:151 | 296 a.a.; | |
| SEQ ID NO:152 | PTA-816 | |
| h TANGO 315, form 2 | FIG. 243 (58-888 b.p.) | |
| 1463 b.p.; | | |
| SEQ ID NO:153 | 277 a.a.; | |
| SEQ ID NO:154 | | |
| h TANGO 330, form 1 | FIG. 249 (2-2803 b.p.) | |
| 3042 b.p.; | | |
| SEQ ID NO:155 | 934 a.a.; | |
| SEQ ID NO:156 | PTA-816 | |
| h TANGO 330, form 2 | FIG. 250 (9-1448 b.p.) | |
| 3808; | | |
| SEQ ID NO:157 | 480 a.a.; | |
| SEQ ID NO:158 | | |
| h TANGO 437, form 1 | FIG. 255 (43-1815 b.p.) | |
| 4336 b.p.; | | |
| SEQ ID NO:159 | 591 a.a.; | |
| SEQ ID NO:160 | PTA-816 | |
| TANGO 480 | FIG. 258 (43-621 b.p.) | |
| 1912 b.p.; | | |
| SEQ ID NO:161 | 193 a.a.; | |
| SEQ ID NO:162 | PTA-816 | |
| h TANGO 437, form 2 | FIG. 260 (43-2298 b.p.) | |
| 3720 b.p.; | | |
| SEQ ID NO:163 | 752 a.a.; | |
| SEQ ID NO:164 | | |

[2089] Various aspects of the invention are described in further detail in the following subsections:

[2090] I. Isolated Nucleic Acid Molecules

[2091] One aspect of the invention pertains to isolated nucleic acid molecules that encode a polypeptide of the invention or a biologically active portion thereof, as well as nucleic acid molecules sufficient for use as hybridization probes to identify nucleic acid molecules encoding a polypeptide of the invention and fragments of such nucleic acid molecules suitable for use as PCR primers for the amplification or mutation of nucleic acid molecules. As used herein, the term “nucleic acid molecule” is intended to include DNA molecules (e.g., cDNA or genomic DNA) and RNA molecules (e.g., mRNA) and analogs of the DNA or RNA generated using nucleotide analogs. The nucleic acid molecule can be single-stranded or double-stranded, but preferably is double-stranded DNA.

[2092] An “isolated” nucleic acid molecule is one which is separated from other nucleic acid molecules which are present in the natural source of the nucleic acid molecule. Preferably, an “isolated” nucleic acid molecule is free of sequences (preferably protein encoding sequences) which naturally flank the nucleic acid (i.e., sequences located at the 5′ and 3′ ends of the nucleic acid) in the genomic DNA of the organism from which the nucleic acid is derived. For example, in various embodiments, the isolated nucleic acid molecule can contain less than about 5 kB, 4 kB, 3 kB, 2 kB, 1 kB, 0.5 kB or 0.1 kB of nucleotide sequences which naturally flank the nucleic acid molecule in genomic DNA of the cell from which the nucleic acid is derived. Moreover, an “isolated” nucleic acid molecule, such as a cDNA molecule, can be substantially free of other cellular material, or culture medium when produced by recombinant techniques, or substantially free of chemical precursors or other chemicals when chemically synthesized. As used herein, the term “isolated” when referring to a nucleic acid molecule does not include an isolated chromosome.

[2093] In instances wherein the nucleic acid molecule is a cDNA or RNA, e.g., mRNA, molecule, such molecules can include a poly A “tail”, or, alternatively, can lack such a 3′ tail. Although cDNA or RNA nucleotide sequences may be depicted herein with such tail sequences, it is to be understood that cDNA nucleic acid molecules of the invention are also intended to include such sequences lacking the depicted poly A tails.

[2094] All or a portion of the nucleic acid sequences of SEQ ID NO: 1, 3, 5, 7, 9, 11, 13, 15, 17, 19, 21, 23, 25, 27, 29, 31, 33, 35, 37, 39, 41, 43, 45, 47, 49, 51, 53, 55, 57, 59, 61, 63, 65, 67, 69, 71, 73, 75, 77, 79, 81, 83, 85, 87, 89, 91, 93, 95, 97, 99, 101, 103, 105, 107, 109, 111, 113, 115, 117, 119, 121, 123, 125, 127, 129, 131, 133, 135, 137, 139, 141, 143, 145, 147, 149, 151, 153, 155, 157, 159, 161, and 163, or a complement thereof, can be used as molecular weight markers when compared to a comparably sized nucleic acid sequence. Likewise, all or a portion of the amino acid sequences encoded by SEQ ID NO: 2, 4, 6, 8, 10, 12, 14, 16, 18, 20, 22, 24, 26, 28, 30, 32, 34, 36, 38, 40, 42, 44, 46, 48, 50, 52, 54, 56, 58, 60, 62, 64, 66, 68, 70, 72, 74, 76, 78, 80, 82, 84, 86, 88, 90, 92, 94, 96, 98, 100, 102, 104, 106, 108, 110, 112, 114, 116, 118, 120, 122, 124, 126, 128, 130, 132, 134, 136, 138, 140, 142, 144, 146, 148, 150, 152, 154, 156, 158, 160, 162, and 164, or a complement thereof can be used as molecular weight markers, in particular as molecular weight markers on SDS-PAGE electrophoresis.

[2095] A nucleic acid molecule of the present invention, e.g., a nucleic acid molecule having the nucleotide sequence of SEQ ID NO: 1, 3, 5, 7, 9, 11, 13, 15, 17, 19, 21, 23, 25, 27, 29, 31, 33, 35, 37, 39, 41, 43, 45, 47, 49, 51, 53, 55, 57, 59, 61, 63, 65, 67, 69, 71, 73, 75, 77, 79, 81, 83, 85, 87, 89, 91, 93, 95, 97, 99, 101, 103, 105, 107, 109, 111, 113, 115, 117, 119, 121, 123, 125, 127, 129, 131, 133, 135, 137, 139, 141, 143, 145, 147, 149, 151, 153, 155, 157, 159, 161, and 163, or a complement thereof, can be isolated using standard molecular biology techniques and the SEQ ID NO: 1, 3, 5, 7, 9, 11, 13, 15, 17, 19, 21, 23, 25, 27, 29, 31, 33, 35, 37, 39, 41, 43, 45, 47, 49, 51, 53, 55, 57, 59, 61, 63, 65, 67, 69, 71, 73, 75, 77, 79, 81, 83, 85, 87, 89, 91, 93, 95, 97, 99, 101, 103, 105, 107, 109, 111, 113, 115, 117, 119, 121, 123, 125, 127, 129, 131, 133, 135, 137, 139, 141, 143, 145, 147, 149, 151, 153, 155, 157, 159, 161, and 163, as a hybridization probe, nucleic acid molecules of the invention can be isolated using standard hybridization and cloning techniques (e.g., as described in Sambrook et al., eds., Molecular Cloning: A Laboratory Manual, 2nd ed., Cold Spring Harbor Laboratory, Cold Spring Harbor Laboratory Press, Cold Spring Harbor, N.Y., 1989).

[2096] A nucleic acid molecule of the invention can be amplified using cDNA, mRNA or genomic DNA as a template and appropriate oligonucleotide primers according to standard PCR amplification techniques. The nucleic acid so amplified can be cloned into an appropriate vector and characterized by DNA sequence analysis. Furthermore, oligonucleotides corresponding to all or a portion of a nucleic acid molecule of the invention can be prepared by standard synthetic techniques, e.g., using an automated DNA synthesizer.

[2097] In another preferred embodiment, an isolated nucleic acid molecule of the invention comprises a nucleic acid molecule which is a complement of the nucleotide sequence of SEQ ID NO: 1, 3, 5, 7, 9, 11, 13, 15, 17, 19, 21, 23, 25, 27, 29, 31, 33, 35, 37, 39, 41, 43, 45, 47, 49, 51, 53, 55, 57, 59, 61, 63, 65, 67, 69, 71, 73, 75, 77, 79, 81, 83, 85, 87, 89, 91, 93, 95, 97, 99, 101, 103, 105, 107, 109, 111, 113, 115, 117, 119, 121, 123, 125, 127, 129, 131, 133, 135, 137, 139, 141, 143, 145, 147, 149, 151, 153, 155, 157, 159, 161, and 163, or a portion thereof. A nucleic acid molecule which is complementary to a given nucleotide sequence is one which is sufficiently complementary to the given nucleotide sequence that it can hybridize to the nucleotide sequence under the conditions set forth herein, thereby forming a stable duplex.

[2098] Moreover, a nucleic acid molecule of the invention can comprise only a portion of a nucleic acid sequence encoding a fall length polypeptide of the invention for example, a fragment which can be used as a probe or primer or a fragment encoding a biologically active portion of a polypeptide of the invention. The nucleotide sequence determined from the cloning one gene allows for the generation of probes and primers designed for use in identifying and/or cloning homologs in other cell types, e.g., from other tissues, as well as homologs from other mammals. The probe/primer typically comprises substantially purified oligonucleotide. In one embodiment, the oligonucleotide typically comprises a region of nucleotide sequence that hybridizes under stringent conditions to at least about 12, preferably about 25, more preferably about 50, 75, 100, 125, 150, 175, 200, 250, 300, 350 or 400 contiguous nucleotides of the sense or anti-sense sequence of INTERCEPT 258, INTERCEPT 307 and INTERCEPT 340, MANGO 003, MANGO 245, MANGO 346, MANGO 347, MANGO 349, and MANGO 511, and TANGO 128, TANGO 136, TANGO 140, TANGO 176, TANGO 197, TANGO 201, TANGO 204, TANGO 206, TANGO 209, 25TANGO 212, TANGO 213, TANGO 214, TANGO 216, TANGO 221, TANGO 222, TANGO 223, TANGO 224, TANGO 244, TANGO 246, TANGO 253, TANGO 257, TANGO 261, TANGO 262, TANGO 266, TANGO 267, TANGO 272, TANGO 275, TANGO 295, TANGO 315, TANGO 330, TANGO 339, TANGO 354, TANGO 358, TANGO 361, TANGO 365, TANGO 368, TANGO 369, TANGO 378, TANGO 383, 30TANGO 437, TANGO 480, and TANGO 499, of a naturally occurring mutant of SEQ ID NO: 1, 3, 5, 7, 9, 11, 13, 15, 17, 19, 21, 23, 25, 27, 29, 31, 33, 35, 37, 39, 41, 43, 45, 47, 49, 51, 53, 55, 57, 59, 61, 63, 65, 67, 69, 71, 73, 75, 77, 79, 81, 83, 85, 87, 89, 91, 93, 95, 97, 99, 101, 103, 105, 107, 109, 111, 113, 115, 117, 119, 121, 123, 125, 127, 129, 131, 133, 135, 137, 139, 141, 143, 145, 147, 149, 151, 153, 155, 157, 159, 161, and 163. In another embodiment, the oligonucleotide comprises a region of nucleotide sequence that hybridizes under stringent conditions to at least 400, preferably 450, 500, 530, 550, 600, 700, 800, 900, 1000 or 1150 consecutive oligonucleotides of the sense or antisense sequence of a nucleic acid molecule of the invention or a naturally occurring mutant thereof.

[2099] Probes based on the sequence of a nucleic acid molecule of the invention can be used to detect transcripts or genomic sequences encoding the same protein molecule encoded by a selected nucleic acid molecule. The probe comprises a label group attached thereto, e.g., a radioisotope, a fluorescent compound, an enzyme, or an enzyme co-factor. Such probes can be used as part of a diagnostic test kit for identifying cells or tissues which mis-express the protein, such as by measuring levels of a nucleic acid molecule encoding the protein in a sample of cells from a subject, e.g., detecting mRNA levels or determining whether a gene encoding the protein has been mutated or deleted.

[2100] A nucleic acid fragment encoding a biologically active portion of a polypeptide of the invention can be prepared by isolating a portion of any of SEQ ID NO: 1, 3, 5, 7, 9, 11, 13, 15, 17, 19, 21, 23, 25, 27, 29, 31, 33, 35, 37, 39, 41, 43, 45, 47, 49, 51, 53, 55, 57, 59, 61, 63, 65, 67, 69, 71, 73, 75, 77, 79, 81, 83, 85, 87, 89, 91, 93, 95, 97, 99, 101, 103, 105, 107, 109, 111, 113, 115, 117, 119, 121, 123, 125, 127, 129, 131, 133, 135, 137, 139, 141, 143, 145, 147, 149, 151, 153, 155, 157, 159, 161, and 163, expressing the portion containing a reading frame of a polypeptide fragment (e.g., by recombinant expression in vitro) and assessing the activity of the encoded portion of the polypeptide fragment.

[2101] The invention further encompasses nucleic acid molecules that differ from the nucleotide sequence of SEQ ID NO: 1, 3, 5, 7, 9, 11, 13, 15, 17, 19, 21, 23, 25, 27, 29, 31, 33, 35, 37, 39, 41, 43, 45, 47, 49, 51, 53, 55, 57, 59, 61, 63, 65, 67, 69, 71, 73, 75, 77, 79, 81, 83, 85, 87, 89, 91, 93, 95, 97, 99, 101, 103, 105, 107, 109, 111, 113, 115, 117, 119, 121, 123, 125, 127, 129, 131, 133, 135, 137, 139, 141, 143, 145, 147, 149, 151, 153, 155, 157, 159, 161, and 163, due to degeneracy of the genetic code and thus encode the same protein as that encoded by the nucleotide sequence any of the above.

[2102] In addition to the nucleotide sequences of SEQ ID NO: 1, 3, 5, 7, 9, 11, 13, 15, 17, 19, 21, 23, 25, 27, 29, 31, 33, 35, 37, 39, 41, 43, 45, 47, 49, 51, 53, 55, 57, 59, 61, 63, 65, 67, 69, 71, 73, 75, 77, 79, 81, 83, 85, 87, 89, 91, 93, 95, 97, 99, 101, 103, 105, 107, 109, 111, 113, 115, 117, 119, 121, 123, 125, 127, 129, 131, 133, 135, 137, 139, 141, 143, 145, 147, 149, 151, 153, 155, 157, 159, 161, and 163, it will be appreciated by those skilled in the art that DNA sequence polymorphisms that lead to changes in the amino acid sequence may exist within a population (e.g., the human population). Such genetic polymorphisms may exist among individuals within a population due to natural allelic variation.

[2103] An allele is one of a group of genes which occur alternatively at a given genetic locus. As used herein, the phrase “allelic variant” refers to a nucleotide sequence which occurs at a given locus or to a polypeptide encoded by the nucleotide sequence.

[2104] For example, TANGO 128 has been mapped to chromosome 4, between flanking markers WI-3936 and AFMCO27ZB9, and therefore, TANGO 128 family members can include nucleotide sequence polymorphisms (e.g., nucleotide sequences that vary from SEQ ID NO: 5) that map to this chromosome 4 region (i.e., between markers WI-3936 and AFMCO27ZB9).

[2105] For example, TANGO 213 has been mapped to chromosome 17, in the region p13.3, between flanking markers WI-5436 and WI-6584, and therefore, TANGO 213 family members can include nucleotide sequence polymorphisms (e.g., nucleotide sequences that vary from SEQ ID NO: 15) that map to this chromosome 17 region (i.e., between markers WI-5436 and WI-6584).

[2106] For example, a human TANGO 201 allele is one that maps to human chromosome 2 between markers D2S123 and D2S378. Likewise, a human TANGO 223 allele is one that maps to human chromosome 15q26 between flanking markers WI-3162 and WI-4919.

[2107] For example, human TANGO 216 has been mapped on radiation hybrid panels to the long arm of chromosome 4, in the region q 11-13, between flanking markers GCT14E02 and jktbp-rs2, and therefore, human TANGO 216 family members can include nucleotide sequence polymorphisms (e.g., nucleotide sequences that vary from SEQ ID NO: 51) that map to this chromosome 4 region (i.e., between markers GCT14E02 and jktbp-rs2).

[2108] For example, the human gene for TANGO 261 has been mapped on radiation hybrid panels to the long arm of chromosome 20, in the region q13.2-13.3, between flanking markers WI-3773 and AFMA202YB9, and therefore, human TANGO 261 family members can include nucleotide sequence polymorphisms (e.g., nucleotide sequences that vary from SEQ ID NO: 55) that map to this chromosome 20 region (i.e., between markers WI-3773 and AFMA202YB9).

[2109] For example, the human gene for TANGO 262 has been mapped on radiation hybrid panels to the long arm of chromosome 14, in the region q23-q24, between flanking markers WI-6253 and WI-5815, and therefore, human TANGO 262 family members can include nucleotide sequence polymorphisms (e.g., nucleotide sequences that vary from SEQ ID NO: 59) that map to this chromosome 14 region (i.e., between markers WI-6253 and WI-5815).

[2110] For example, the human gene for TANGO 267 was mapped on radiation hybrid panels to the long arm of chromosome X, in the region q12, between flanking markers WI-5587 and WI-5717, and therefore, human TANGO 267 family members can include nucleotide sequence polymorphisms (e.g., nucleotide sequences that vary from SEQ ID NO: 65) that map to this chromosome X region (i.e., between markers WI-5587 and WI-5717).

[2111] For example, human TANGO 204 has been mapped on radiation hybrid panels to the long arm of chromosome 8q, in the region, between flanking markers D1Mit430 and D1Mit119, and therefore, human TANGO 204 family members can include nucleotide sequence polymorphisms (e.g., nucleotide sequences that vary from SEQ ID NO: 79) that map to this chromosome 8 region (i.e., between markers D1Mit430 and D1Mit119).

[2112] For example, the human gene for TANGO 209 has been mapped on radiation hybrid panels to the long arm of chromosome 6, in the region q26-27, between flanking markers ATA22G07 and WI-9405, and therefore, human TANGO 209 family members can include nucleotide sequence polymorphisms (e.g., nucleotide sequences that vary from SEQ ID NO: 87) that map to this chromosome 6 region (i.e., between markers ATA22G07 and WI-9405).

[2113] For example, TANGO 339 has been mapped to chromosome 10, and therefore TANGO 339, family members can include nucleotide sequence polymorphisms (e.g., nucleotide sequences that vary from SEQ ID NO: 125) that map to this chromosome 10 region, and such sequences represent allelic variants.

[2114] For example, INTERCEPT 307 has been mapped to chromosome 11, and therefore INTERCEPT 307 family members can include nucleotide sequence polymorphisms (e.g., nucleotide sequences that vary from SEQ ID NO: 141) that map to this chromosome 11 region (i.e., between markers D11 S1357 and D1 IS1765), and such sequences represent INTERCEPT 307 allelic variants.

[2115] As used herein, the terms “gene” and “recombinant gene” refer to nucleic acid molecules comprising an open reading frame encoding a polypeptide of the invention.

[2116] Such natural allelic variations can typically result in 1-5% variance in the nucleotide sequence of a given gene. Alternative alleles can be identified by sequencing the gene of interest in a number of different individuals. This can be readily carried out by using hybridization probes to identify the same genetic locus in a variety of individuals. Any and all such nucleotide variations and resulting amino acid polymorphisms or variations that are the result of natural allelic variation and that do not alter the functional activity are intended to be within the scope of the invention. In one embodiment, polymorphisms that are associated with a particular disease and/or disorder are used as markers to diagnose said disease or disorder. In a preferred embodiment, polymorphisms are used as a marker to diagnose abnormal coronary function such as atherosclerosis.

[2117] Moreover, nucleic acid molecules encoding proteins of the invention from other species (homologs), which have a nucleotide sequence which differs from that of the human or mouse protein described herein are intended to be within the scope of the invention. Nucleic acid molecules corresponding to natural allelic variants and homologs of a cDNA of the invention can be isolated based on their identity to the human nucleic acid molecule disclosed herein using the human cDNA, or a portion thereof, as a hybridization probe according to standard hybridization techniques under stringent hybridization conditions. For example, a cDNA encoding a soluble form of a membrane-bound protein of the invention isolated based on its hybridization to a nucleic acid molecule encoding all or part of the membrane-bound form. Likewise, a cDNA encoding a membrane-bound form can be isolated based on its hybridization to a nucleic acid molecule encoding all or part of the soluble form.

[2118] Accordingly, in another embodiment, an isolated nucleic acid molecule of the invention is at least 500, 600, 700, 800, 900, 1000, 1100, 1200, 1300, 1400, 1500, 1600, 1700, 1800, 1900 or 2000 contiguous nucleotides in length and hybridizes under stringent conditions to the nucleic acid molecule comprising the nucleotide sequence, preferably the coding sequence, of SEQ ID NO: 1, 3, 5, 7, 9, 11, 13, 15, 17, 19, 21, 23, 25, 27, 29, 31, 33, 35, 37, 39, 41, 43, 45, 47, 49, 51, 53, 55, 57, 59, 61, 63, 65, 67, 69, 71, 73, 75, 77, 79, 81, 83, 85, 87, 89, 91, 93, 95, 97, 99, 101, 103, 105, 107, 109, 111, 113, 115, 117, 119, 121, 123, 125, 127, 129, 131, 133, 135, 137, 139, 141, 143, 145, 147, 149, 151, 153, 155, 157, 159, 161, and 163, or a complement thereof.

[2119] Accordingly, in another embodiment, an isolated nucleic acid molecule of the invention is at least 25, 50, 100, 200, 300, 400, 500, 600, 700, 800 or 900 contiguous nucleotides in length and hybridizes under stringent conditions to the nucleic acid molecule comprising the nucleotide sequence, preferably the coding sequence, of SEQ ID NO: 1, 3, 5, 7, 9, 11, 13, 15, 17, 19, 21, 23, 25, 27, 29, 31, 33, 35, 37, 39, 41, 43, 45, 47, 49, 51, 53, 55, 57, 59, 61, 63, 65, 67, 69, 71, 73, 75, 77, 79, 81, 83, 85, 87, 89, 91, 93, 95, 97, 99, 101, 103, 105, 107, 109, 111, 113, 115, 117, 119, 121, 123, 125, 127, 129, 131, 133, 135, 137, 139, 141, 143, 145, 147, 149, 151, 153, 155, 157, 159, 161, and 163, or a complement thereof.

[2120] As used herein, the term “hybridizes under stringent conditions” is intended to describe conditions for hybridization and washing under which nucleotide sequences at least 60% (65%, 70%, preferably 75%) identical to each other typically remain hybridized to each other. Such stringent conditions are known to those skilled in the art and can be found in Current Protocols in Molecular Biology, John Wiley & Sons, N. Y. (1989), 6.3.1-6.3.6. A preferred, non-limiting example of stringent hybridization conditions are hybridization in 6× sodium chloride/sodium citrate (SSC) at about 45° C. followed by one or more washes in 0.2×SSC, 0.1% SDS at 50-65° C. Preferably, an isolated nucleic acid molecule of the invention that hybridizes under stringent conditions to the sequence of SEQ ID NO: 1, 3, 5, 7, 9, 11, 13, 15, 17, 19, 21, 23, 25, 27, 29, 31, 33, 35, 37, 39, 41, 43, 45, 47, 49, 51, 53, 55, 57, 59, 61, 63, 65, 67, 69, 71, 73, 75, 77, 79, 81, 83, 85, 87, 89, 91, 93, 95, 97, 99, 101, 103, 105, 107, 109, 111, 113, 115, 117, 119, 121, 123, 125, 127, 129, 131, 133, 135, 137, 139, 141, 143, 145, 147, 149, 151, 153, 155, 157, 159, 161, and 163, or a complement thereof, corresponds to a naturally-occurring nucleic acid molecule. As used herein, a “naturally-occurring” nucleic acid molecule refers to an RNA or DNA molecule having a nucleotide sequence that occurs in nature (e.g., encodes a natural protein).

[2121] In addition to naturally-occurring allelic variants of a nucleic acid molecule of the invention sequence that may exist in the population, the skilled artisan will further appreciate that changes can be introduced by mutation thereby leading to changes in the amino acid sequence of the encoded protein, without altering the biological activity of the protein. For example, one can make nucleotide substitutions leading to amino acid substitutions at “non-essential” amino acid residues. A “non-essential” amino acid residue is a residue that can be altered from the wild-type sequence without altering the biological activity, whereas an “essential” amino acid residue is required for biological activity. For example, amino acid residues that are not conserved or only semi-conserved among homologs of various species may be non-essential for activity and thus would be likely targets for alteration. Alternatively, amino acid residues that are conserved among the homologs of various species (e.g., mouse and human) may be essential for activity and thus would not be likely targets for alteration.

[2122] Accordingly, another aspect of the invention pertains to nucleic acid molecules encoding a polypeptide of the invention that contain changes in amino acid residues that are not essential for activity. Such polypeptides differ in amino acid sequence from INTERCEPT 258, INTERCEPT 307 and INTERCEPT 340, MANGO 003, MANGO 245, MANGO 346, MANGO 347, MANGO 349, and MANGO 511, and TANGO 128, TANGO 136, TANGO 140, TANGO 176, TANGO 197, TANGO 201, TANGO 204, TANGO 206, TANGO 209, TANGO 212, TANGO 213, TANGO 214, TANGO 216, TANGO 221, TANGO 222, TANGO 223, TANGO 224, TANGO 244, TANGO 246, TANGO 253, TANGO 257, TANGO 261, TANGO 262, TANGO 266, TANGO 267, TANGO 272, TANGO 275, TANGO 295, TANGO 315, TANGO 330, TANGO 339, TANGO 354, TANGO 358, TANGO 361, TANGO 365, TANGO 368, TANGO 369, TANGO 378, TANGO 383, TANGO 437, TANGO 480, and TANGO 499, yet retain biological activity. In one embodiment, the isolated nucleic acid molecule includes a nucleotide sequence encoding a protein that includes an amino acid sequence that is at least about 30%, 35%, 40%, 45%, 50%, 55%, 60%, 65%, 75%, 85%, 95%, or 98% identical to the amino acid sequence of a polypeptide of the invention.

[2123] An isolated nucleic acid molecule encoding a variant protein can be created by introducing one or more nucleotide substitutions, additions or deletions into the nucleotide sequence of INTERCEPT 258, INTERCEPT 307 and INTERCEPT 340, MANGO 003, MANGO 245, MANGO 346, MANGO 347, MANGO 349, and MANGO 511, and TANGO 128, TANGO 136, TANGO 140, TANGO 176, TANGO 197, TANGO 201, TANGO 204, TANGO 206, TANGO 209, TANGO 212, TANGO 213, TANGO 214, TANGO 216, TANGO 221, TANGO 222, TANGO 223, TANGO 224, TANGO 244, TANGO 246, TANGO 253, TANGO 257, TANGO 261, TANGO 262, TANGO 266, TANGO 267, TANGO 272, TANGO 275, TANGO 295, TANGO 315, TANGO 330, TANGO 339, TANGO 354, TANGO 358, TANGO 361, TANGO 365, TANGO 368, TANGO 369, TANGO 378, TANGO 383, TANGO 437, TANGO 480, and TANGO 499, such that one or more amino acid substitutions, additions or deletions are introduced into the encoded protein. Mutations can be introduced by standard techniques, such as site-directed mutagenesis and PCR-mediated mutagenesis. Preferably, conservative amino acid substitutions are made at one or more predicted non-essential amino acid residues. A “conservative amino acid substitution” is one in which the amino acid residue is replaced with an amino acid residue having a similar side chain. Families of amino acid residues having similar side chains have been defined in the art. These families include amino acids with basic side chains (e.g., lysine, arginine, histidine), acidic side chains (e.g. aspartic acid, glutamic acid, asparagine, glutamine), uncharged polar side chains (e.g., glycine, serine, threonine, tyrosine, cysteine), nonpolar side chains (e.g., alanine, valine, leucine, isoleucine, proline, phenylalanine, methionine, tryptophan), beta-branched side chains (e.g., threonine, valine, isoleucine) and aromatic side chains (e.g., tyrosine, phenylalanine, tryptophan, histidine). Alternatively, mutations can be introduced randomly along all or part of the coding sequence, such as by saturation mutagenesis, and the resultant mutants can be screened for biological activity to identify mutants that retain activity. Following mutagenesis, the encoded protein can be expressed recombinantly and the activity of the protein can be determined.

[2124] In a preferred embodiment, a mutant polypeptide that is a variant of a polypeptide of the invention can be assayed for: (1) the ability to form protein-protein interactions with proteins in a signaling pathway of the polypeptide of the invention such as in cells with the proteins encoded by the genes of the present invention; (2) the ability to bind a ligand of the polypeptide of the invention (i.e., in transmembrane proteins of the invention or alternatively, secreted proteins which are the ligand for a cellular receptor); or (3) the ability to bind to an intracellular target protein of the polypeptide of the invention. In yet another preferred embodiment, the mutant polypeptide can be assayed for the ability to modulate cellular proliferation, cellular migration, motility or chemotaxis, or cellular differentiation.

[2125] The present invention encompasses antisense nucleic acid molecules, i.e., molecules which are complementary to a sense nucleic acid encoding a polypeptide of the invention, e.g., complementary to the coding strand of a double-stranded cDNA molecule or complementary to an mRNA sequence. Accordingly, an antisense nucleic acid can hydrogen bond to a sense nucleic acid. The antisense nucleic acid can be complementary to an entire coding strand, or to only a portion thereof, e.g., all or part of the protein coding region (or open reading frame). An antisense nucleic acid molecule can be antisense to all or part of a non-coding region of the coding strand of a nucleotide sequence encoding a polypeptide of the invention. The non-coding regions (“5′ and 3′ untranslated regions”) are the 5′ and 3′ sequences which flank the coding region and are not translated into amino acids.

[2126] An antisense oligonucleotide can be, for example, about 5, 10, 15, 20, 25, 30, 35, 40, 45 or 50 nucleotides or more in length. An antisense nucleic acid of the invention can be constructed using chemical synthesis and enzymatic ligation reactions using procedures known in the art. For example, an antisense nucleic acid (e.g., an antisense oligonucleotide) can be chemically synthesized using naturally occurring nucleotides or variously modified nucleotides designed to increase the biological stability of the molecules or to increase the physical stability of the duplex formed between the antisense and sense nucleic acids, e.g., phosphorothioate derivatives and acridine substituted nucleotides can be used. Examples of modified nucleotides which can be used to generate the antisense nucleic acid include 5-fluorouracil, 5-bromouracil, 5-chlorouracil, 5-iodouracil, hypoxanthine, xanthine, 4-acetylcytosine, 5-(carboxyhydroxylmethyl) uracil, 5-carboxymethylaminomethyl-2-thiouridine, 5-carboxymethylaminomethyluracil, dihydrouracil, beta-D-galactosylqueosine, inosine, N6-isopentenyladenine, 1-methylguanine, 1-methylinosine, 2,2-dimethylguanine, 2-methyladenine, 2-methylguanine, 3-methylcytosine, 5-methylcytosine, N6-adenine, 7-methylguanine, 5-methylaminomethyluracil, 5-methoxyaminomethyl-2-thiouracil, beta-D-mannosylqueosine, 5′-methoxycarboxymethyluracil, 5-methoxyuracil, 2-methylthio-N6-isopentenyladenine, uracil-5-oxyacetic acid (v), wybutoxosine, pseudouracil, queosine, 2-thiocytosine, 5-methyl-2-thiouracil, 2-thiouracil, 4-thiouracil, 5-methyluracil, uracil-5-oxyacetic acid methylester, uracil-5-oxyacetic acid (v), 5-methyl-2-thiouracil, 3-(3-amino-3-N-2-carboxypropyl) uracil, (acp3)w, and 2,6-diaminopurine. Alternatively, the antisense nucleic acid can be produced biologically using an expression vector into which a nucleic acid has been subcloned in an antisense orientation (i.e., RNA transcribed from the inserted nucleic acid will be of an antisense orientation to a target nucleic acid of interest, described further in the following subsection).

[2127] The antisense nucleic acid molecules of the invention are typically administered to a subject or generated in situ such that they hybridize with or bind to cellular mRNA and/or genomic DNA encoding a selected polypeptide of the invention to thereby inhibit expression, e.g., by inhibiting transcription and/or translation. The hybridization can be by conventional nucleotide complementarity to form a stable duplex, or, for example, in the case of an antisense nucleic acid molecule which binds to DNA duplexes, through specific interactions in the major groove of the double helix. An example of a route of administration of antisense nucleic acid molecules of the invention includes direct injection at a tissue site. Alternatively, antisense nucleic acid molecules can be modified to target selected cells and then administered systemically. For example, for systemic administration, antisense molecules can be modified such that they specifically bind to receptors or antigens expressed on a selected cell surface, e.g., by linking the antisense nucleic acid molecules to peptides or antibodies which bind to cell surface receptors or antigens. The antisense nucleic acid molecules can also be delivered to cells using the vectors described herein. To achieve sufficient intracellular concentrations of the antisense molecules, vector constructs in which the antisense nucleic acid molecule is placed under the control of a strong pol II or pol III promoter are preferred.

[2128] An antisense nucleic acid molecule of the invention can be an α-anomeric nucleic acid molecule. An α-anomeric nucleic acid molecule forms specific double-stranded hybrids with complementary RNA in which, contrary to the usual β-units, the strands run parallel to each other (Gaultier et al. (1987) Nucleic Acids Res. 15:6625-6641). The antisense nucleic acid molecule can also comprise a 2′-o-methylribonucleotide (Inoue et al. (1987) Nucleic Acids Res. 15:6131-6148) or a chimeric RNA-DNA analogue (Inoue et al. (1987) FEBS Lett. 215:327-330).

[2129] The invention also encompasses ribozymes. Ribozymes are catalytic RNA molecules with ribonuclease activity which are capable of cleaving a single-stranded nucleic acid, such as an mRNA, to which they have a complementary region. Thus, ribozymes (e.g., hammerhead ribozymes (described in Haselhoff and Gerlach, (1988), Nature 334:585-591)) can be used to catalytically cleave mRNA transcripts to thereby inhibit translation of the protein encoded by the mRNA. A ribozyme having specificity for a nucleic acid molecule encoding a polypeptide of the invention can be designed based upon the nucleotide sequence of a cDNA disclosed herein. For example, a derivative of a Tetrahymena L-19 IVS RNA can be constructed in which the nucleotide sequence of the active site is complementary to the nucleotide sequence to be cleaved in a Cech et al. U.S. Pat. No. 4,987,071; and Cech et al. U.S. Pat. No. 5,116,742. Alternatively, an mRNA encoding a polypeptide of the invention can be used to select a catalytic RNA having a specific ribonuclease activity from a pool of RNA molecules. See, e.g., Bartel and Szostak (1993) Science 261:1411-1418.

[2130] The invention also encompasses nucleic acid molecules which form triple helical structures. For example, expression of a polypeptide of the invention can be inhibited by targeting nucleotide sequences complementary to the regulatory region of the gene encoding the polypeptide (e.g., the promoter and/or enhancer) to form triple helical structures that prevent transcription of the gene in target cells. See generally Helene (1991) Anticancer Drug Des. 6(6):569-84; Helene (1992) Ann. N.Y. Acad. Sci. 660:27-36; and Maher (1992) Bioassays 14(12):807-15.

[2131] In various embodiments, the nucleic acid molecules of the invention can be modified at the base moiety, sugar moiety or phosphate backbone to improve, e.g., the stability, hybridization, or solubility of the molecule. For example, the deoxyribose phosphate backbone of the nucleic acids can be modified to generate peptide nucleic acids (see Hyrup et al. (1996) Bioorganic & Medicinal Chemistry 4(1): 5-23). As used herein, the terms “peptide nucleic acids” or “PNAs” refer to nucleic acid mimics, e.g., DNA mimics, in which the deoxyribose phosphate backbone is replaced by a pseudopeptide backbone and only the four natural nucleobases are retained. The neutral backbone of PNAs has been shown to allow for specific hybridization to DNA and RNA under conditions of low ionic strength. The synthesis of PNA oligomers can be performed using standard solid phase peptide synthesis protocols as described in Hyrup et al. (1996), supra; Perry-O'Keefe et al. (1996) Proc. Natl. Acad. Sci. USA 93: 14670-675.

[2132] PNAs can be used in therapeutic and diagnostic applications. For example, PNAs can be used as antisense or antigene agents for sequence-specific modulation of gene expression by, e.g., inducing transcription or translation arrest or inhibiting replication. PNAs can also be used, e.g., in the analysis of single base pair mutations in a gene by, e.g., PNA directed PCR clamping; as artificial restriction enzymes when used in combination with other enzymes, e.g., S1 nucleases (Hyrup (1996), supra; or as probes or primers for DNA sequence and hybridization (Hyrup (1996), supra; Perry-O'Keefe et al. (1996) Proc. Natl. Acad. Sci. USA 93: 14670-675).

[2133] In another embodiment, PNAs can be modified, e.g., to enhance their stability or cellular uptake, by attaching lipophilic or other helper groups to PNA, by the formation of PNA-DNA chimeras, or by the use of liposomes or other techniques of drug delivery known in the art. For example, PNA-DNA chimeras can be generated which may combine the advantageous properties of PNA and DNA. Such chimeras allow DNA recognition enzymes, e.g., RNAse H and DNA polymerases, to interact with the DNA portion while the PNA portion would provide high binding affinity and specificity. PNA-DNA chimeras can be linked using linkers of appropriate lengths selected in terms of base stacking, number of bonds between the nucleobases, and orientation (Hyrup (1996), supra). The synthesis of PNA-DNA chimeras can be performed as described in Hyrup (1996), supra, and Finn et al. (1996) Nucleic Acids Res. 24(17):3357-63. For example, a DNA chain can be synthesized on a solid support using standard phosphoramidite coupling chemistry and modified nucleoside analogs. Compounds such as 5′-(4-methoxytrityl)amino-5′-deoxy-thymidine phosphoramidite can be used as a link between the PNA and the 5′ end of DNA (Mag et al. (1989) Nucleic Acids Res. 17:5973-88). PNA monomers are then coupled in a stepwise manner to produce a chimeric molecule with a 5′ PNA segment and a 3′ DNA segment (Finn et al. (1996) Nucleic Acids Res. 24(17):3357-63). Alternatively, chimeric molecules can be synthesized with a 5′ DNA segment and a 3′ PNA segment (Peterser et al. (1975) Bioorganic Med. Chem. Lett. 5:1119-11124).

[2134] In other embodiments, the oligonucleotide may include other appended groups such as peptides (e.g., for targeting host cell receptors in vivo), or agents facilitating transport across the cell membrane (see, e.g., Letsinger et al. (1989) Proc. Natl. Acad. Sci. USA 86:6553-6556; Lemaitre et al. (1987) Proc. Natl Acad. Sci. USA 84:648-652; PCT Publication No. WO 88/09810) or the blood-brain barnier (see, e.g., PCT Publication No. WO 89/10134). In addition, oligonucleotides can be modified with hybridization-triggered cleavage agents (see, e.g., Krol et al. (1988) Bio/Techniques 6:958-976) or intercalating agents (see, e.g., Zon (1988) Pharm. Res. 5:539-549). To this end, the oligonucleotide may be conjugated to another molecule, e.g., a peptide, hybridization triggered cross-linking agent, transport agent, hybridization-triggered cleavage agent, etc.

[2135] In still other embodiments, the nucleotides of the invention including variants and derivatives can be used as vaccines, for example by genetic immunization. Genetic immunization is particularly advantageous as it stimulates a cytotoxic T-cell response but does not utilize live attenuated vaccines, which can revert to a virulent form and infect the host causing the very infection sought to be prevented. As used herein, genetic immunization comprises inserting the nucleotides of the invention into a host, such that the nucleotides are taken up by cells of the host and the proteins encoded by the nucleotides are translated. These translated proteins are then either secreted or processed by the host cell for presentation to immune cells and an immune reaction is stimulated. Preferably, the immune reaction is a cytotoxic T cell response, however, a humoral response or macrophage stimulation is also useful in preventing future infections. The skilled artisan will appreciate that there are various methods for introducing foreign nucleotides into a host animal and subsequently into cells for genetic immunization, for example, by intramuscular injection of about 50 μg of plasmid DNA encoding the proteins of the invention solubilized in 50 μl of sterile saline solution, with a suitable adjuvant (Weiner and Kennedy (1999) Scientific American 7:50-57; Lowrie et al., (1999) Nature 400:269-271).

[2136] II. Isolated Proteins and Antibodies

[2137] One aspect of the invention pertains to isolated proteins, and biologically active portions thereof, as well as polypeptide fragments suitable for use as immunogens to raise antibodies directed against a polypeptide of the invention. In one embodiment, the native polypeptide can be isolated from cells or tissue sources by an appropriate purification scheme using standard protein purification techniques. In another embodiment, polypeptides of the invention are produced by recombinant DNA techniques. Alternative to recombinant expression, a polypeptide of the invention can be synthesized chemically using standard peptide synthesis techniques.

[2138] An “isolated” or “purified” protein or biologically active portion thereof is substantially free of cellular material or other contaminating proteins from the cell or tissue source from which the protein is derived, or substantially free of chemical precursors or other chemicals when chemically synthesized. The language “substantially free of cellular material” includes preparations of protein in which the protein is separated from cellular components of the cells from which it is isolated or recombinantly produced. Thus, protein that is substantially free of cellular material includes preparations of protein having less than 0about 30%, 20%, 10%, or 5% (by dry weight) of heterologous protein (also referred to herein as a “contaminating protein”). When the protein or biologically active portion thereof is recombinantly produced, it is also preferably substantially free of culture medium, i.e., culture medium represents less than about 20%, 10%, or 5% of the volume of the protein preparation. When the protein is produced by chemical synthesis, it is preferably substantially free of chemical precursors or other chemicals, i.e., it is separated from chemical precursors or other chemicals which are involved in the synthesis of the protein. Accordingly such preparations of the protein have less than about 30%, 20%, 10%, 5% (by dry weight) of chemical precursors or compounds other than the polypeptide of interest.

[2139] Biologically active portions of a polypeptide of the invention include polypeptides comprising amino acid sequences sufficiently identical to or derived from the amino acid sequence of the protein (e.g., the amino acid sequence shown in any of INTERCEPT 258, INTERCEPT 307 and INTERCEPT 340, MANGO 003, MANGO 245, MANGO 346, MANGO 347, MANGO 349, and MANGO 511, and TANGO 128, TANGO 136, TANGO 140, TANGO 176, TANGO 197, TANGO 201, TANGO 204, TANGO 206, TANGO 209, 35 TANGO 212, TANGO 213, TANGO 214, TANGO 216, TANGO 221, TANGO 222, TANGO 223, TANGO 224, TANGO 244, TANGO 246, TANGO 253, TANGO 257, TANGO 261, TANGO 262, TANGO 266, TANGO 267, TANGO 272, TANGO 275, TANGO 295, TANGO 315, TANGO 330, TANGO 339, TANGO 354, TANGO 358, TANGO 361, TANGO 365, TANGO 368, TANGO 369, TANGO 378, TANGO 383, TANGO 437, TANGO 480, and TANGO 499, which include fewer amino acids than the full length protein, and exhibit at least one activity of the corresponding full-length protein. Typically, biologically active portions comprise a domain or motif with at least one activity of the corresponding protein. A biologically active portion of a protein of the invention can be a polypeptide which is, for example, 10, 25, 50, 100 or more amino acids in length. Moreover, other biologically active portions, in which other regions of the protein are deleted, can be prepared by recombinant techniques and evaluated for one or more of the functional activities of the native form of a polypeptide of the invention.

[2140] Preferred polypeptides have the amino acid sequence of SEQ ID NO: 2, 4, 6, 8, 10, 12, 14, 16, 18, 20, 22, 24, 26, 28, 30, 32, 34, 36, 38, 40, 42, 44, 46, 48, 50, 52, 54, 56, 58, 60, 62, 64, 66, 68, 70, 72, 74, 76, 78, 80, 82, 84, 86, 88, 90, 92, 94, 96, 98, 100, 102, 104, 106, 108, 110, 112, 114, 116,118, 120, 122, 124,126, 128, 130, 132, 134, 136, 138, 140, 142, 144, 146, 148, 150, 152, 154, 156, 158, 160,162, and 164. Other useful proteins are substantially identical (e.g., at least about 45%, preferably 55%, 65%, 75%, 85%, 95%, or 99%) to any of SEQ ID NO: 2, 4, 6, 8, 10, 12, 14, 16, 18, 20, 22, 24, 26, 28, 30, 32, 34, 36, 38, 40, 42, 44, 46, 48, 50, 52, 54, 56, 58, 60, 62, 64, 66, 68, 70, 72, 74, 76, 78, 80, 82, 84, 86, 88,90,92,94,96,98, 100,102,104, 106,108,110,112,114, 116, 118,120, 122,124, 126, 128, 130, 132, 134, 136, 138, 140, 142, 144, 146, 148, 150, 152, 154, 156, 158, 160, 162, and 164, and retain the functional activity of the protein of the corresponding naturally-occurring protein yet differ in amino acid sequence due to natural allelic variation or mutagenesis.

[2141] To determine the percent identity of two amino acid sequences or of two nucleic acids, the sequences are aligned for optimal comparison purposes (e.g., gaps can be introduced in the sequence of a first amino acid or nucleic acid sequence for optimal alignment with a second amino or nucleic acid sequence). The amino acid residues or nucleotides at corresponding amino acid positions or nucleotide positions are then compared. When a position in the first sequence is occupied by the same amino acid residue or nucleotide as the corresponding position in the second sequence, then the molecules are identical at that position. The percent identity between the two sequences is a function of the number of identical positions shared by the sequences (i.e., % identity =# of identical positions/total # of positions (e.g., overlapping positions)×100). In one embodiment, the two sequences are the same length.

[2142] The determination of percent identity between two sequences can be accomplished using a mathematical algorithm. A preferred, non-limiting example of a mathematical algorithm utilized for the comparison of two sequences is the algorithm of Karlin and Altschul (1990) Proc. Natl. Acad. Sci. USA 87:2264-2268, modified as in Karlin and Altschul (1993) Proc. Natl. Acad. Sci. USA 90:5873-5877. Such an algorithm is incorporated into the NBLAST and XBLAST programs of Altschul, et al. (1990) J. Mol. Biol. 215:403-410. BLAST nucleotide searches can be performed with the NBLAST program, score=100, wordlength=12 to obtain nucleotide sequences homologous to a nucleic acid molecules of the invention. BLAST protein searches can be performed with the XBLAST program, score=50, wordlength=3 to obtain amino acid sequences homologous to a protein molecules of the invention. To obtain gapped alignments for comparison purposes, Gapped BLAST can be utilized as described in Altschul et al. (1997) Nucleic Acids Res. 25:3389-3402. Alternatively, PSI-Blast can be used to perform an iterated search which detects distant relationships between molecules (Id.). When utilizing BLAST, Gapped BLAST, and PSI-Blast programs, the default parameters of the respective programs (e.g., XBLAST and NBLAST) can be used. See http://www.ncbi.nlm.nih.gov.

[2143] Another preferred, non-limiting example of a mathematical algorithm utilized for the comparison of sequences is the algorithm of Myers and Miller, (1988) CABIOS 4:11-17. Such an algorithm is incorporated into the ALIGN program (version 2.0) which is part of the GCG sequence alignment software package. When utilizing the ALIGN program for comparing amino acid sequences, a PAM120 weight residue table, a gap length penalty of 12, and a gap penalty of 4 can be used. Additional algorithms for sequence analysis are known in the art and include ADVANCE and ADAM as described in Torellis and Robotti (1994) Comput. Appl. Biosci., 10:3-5; and FASTA described in Pearson and Lipman (1988) Proc. Natl. Acad. Sci. 85:2444-8. Within FASTA, ktup is a control option that sets the sensitivity and speed of the search. If ktup=2, similar regions in the two sequences being compared are found by looking at pairs of aligned residues; if ktup=1, single aligned amino acids are examined. ktup can be set to 2 or 1 for protein sequences, or from 1 to 6 for DNA sequences. The default if ktup is not specified is 2 for proteins and 6 for DNA. For a further description of FASTA parameters, see http://bioweb.pasteur.fr/docs/man/man/fasta.1.html#sect2, the contents of which are incorporated herein by reference.

[2144] The percent identity between two sequences can be determined using techniques similar to those described above, with or without allowing gaps. In calculating percent identity, only exact matches are counted.

[2145] The invention also provides chimeric or fusion proteins. As used herein, a “chimeric protein” or “fusion protein” comprises all or part (preferably biologically active) of a polypeptide of the invention operably linked to a heterologous polypeptide (i.e., a polypeptide other than the same polypeptide of the invention). Within the fusion protein, the term “operably linked” is intended to indicate that the polypeptide of the invention and the heterologous polypeptide are fused in-frame to each other. The heterologous polypeptide can be fused to the N-terminus or C-terminus of the polypeptide of the invention.

[2146] In another embodiment, the protein of the invention can be expressed as a dimer of itself. In this embodiment, a first domain of the protein is fused in frame to the same domain by a linker region. The linker can be a short flexible segment of amino acids, for example GGPGG or GPPGG, or a longer segment as needed. Alternatively, the first domain of the protein can be fused to a second domain of the protein, which is different than the first domain.

[2147] One useful fusion protein is a GST fusion protein in which the polypeptide of the invention is fused to the C-terminus of GST sequences. Such fusion proteins can facilitate the purification of a recombinant polypeptide of the invention.

[2148] In another embodiment, the fusion protein contains a heterologous signal sequence at its N-terminus. For example, the native signal sequence of a polypeptide of the invention can be removed and replaced with a signal sequence from another protein. For example, the gp67 secretory sequence of the baculovirus envelope protein can be used as a heterologous signal sequence (Current Protocols in Molecular Biology, Ausubel et al., eds., John Wiley & Sons, 1992). Other examples of eukaryotic heterologous signal sequences include the secretory sequences of melittin and human placental alkaline phosphatase (Stratagene; La Jolla, Calif.). In yet another example, useful prokaryotic heterologous signal sequences include the phoA secretory signal (Sambrook et al., supra) and the protein A secretory signal (Pharmacia Biotech; Piscataway, N.J.).

[2149] In yet another embodiment, the fusion protein is an immunoglobulin fusion protein in which all or part of a polypeptide of the invention is fused with sequences derived from a member of the immunoglobulin protein family. The immunoglobulin fusion proteins of the invention can be incorporated into pharmaceutical compositions and administered to a subject to inhibit an interaction between a ligand (soluble or membrane-bound) and a protein on the surface of a cell (receptor), to thereby suppress signal transduction in vivo. The immunoglobulin fusion protein can be used to affect the bioavailability of a cognate ligand of a polypeptide of the invention. Inhibition of ligand/receptor interaction can be useful therapeutically, both for treating proliferative and differentiative disorders and for modulating (e.g., promoting or inhibiting) cell survival. Moreover, the immunoglobulin fusion proteins of the invention can be used as immunogens to produce antibodies directed against a polypeptide of the invention in a subject, to purify ligands and in screening assays to identify molecules which inhibit the interaction of receptors with ligands. The immunoglobulin fusion protein can, for example, comprise a portion of a polypeptide of the invention fused with the amino-terminus or the carboxyl-terminus of an immunoglobulin constant region, as disclosed in U.S. Pat. No. 5,714,147, U.S. Pat. No. 5,116,964, U.S. Pat. No. 5,514,582, and U.S. Pat. No. 5,455,165.

[2150] Chimeric and fusion proteins of the invention can be produced by standard recombinant DNA techniques. In another embodiment, the fusion gene can be synthesized by conventional techniques including automated DNA synthesizers. Alternatively, PCR amplification of gene fragments can be carried out using anchor primers which give rise to complementary overhangs between two consecutive gene fragments which can subsequently be annealed and reamplified to generate a chimeric gene sequence (see, e.g., Ausubel et al., supra). Moreover, many expression vectors are commercially available that already encode a fusion moiety (e.g., a GST polypeptide). A nucleic acid encoding a polypeptide of the invention can be cloned into such an expression vector such that the fusion moiety is linked in-frame to the polypeptide of the invention.

[2151] A signal sequence of a polypeptide of the invention can be used to facilitate secretion and isolation of the secreted protein or other proteins of interest. Signal sequences are typically characterized by a core of hydrophobic amino acids which are generally cleaved from the mature protein during secretion in one or more cleavage events. Such signal peptides contain processing sites that allow cleavage of the signal sequence from the mature proteins as they pass through the secretory pathway. Thus, the invention pertains to the described polypeptides having a signal sequence, as well as to the signal sequence itself and to the polypeptide in the absence of the signal sequence (i.e., the cleavage products). In one embodiment, a nucleic acid sequence encoding a signal sequence of the invention can be operably linked in an expression vector to a protein of interest, such as a protein which is ordinarily not secreted or is otherwise difficult to isolate. The signal sequence directs secretion of the protein, such as from a eukaryotic host into which the expression vector is transformed, and the signal sequence is subsequently or concurrently cleaved. The protein can then be readily purified from the extracellular medium by art recognized methods. Alternatively, the signal sequence can be linked to the protein of interest using a sequence which facilitates purification, such as with a GST domain.

[2152] In another embodiment, the signal sequences of the present invention can be used to identify regulatory sequences, e.g., promoters, enhancers, repressors. Since signal sequences are the most amino-terminal sequences of a peptide, it is expected that the nucleic acids which flank the signal sequence on its amino-terminal side will be regulatory sequences which affect transcription. Thus, a nucleotide sequence which encodes all or a portion of a signal sequence can be used as a probe to identify and isolate signal sequences and their flanking regions, and these flanking regions can be studied to identify regulatory elements therein.

[2153] The present invention also pertains to variants of the polypeptides of the invention. Such variants have an altered amino acid sequence which can function as either agonists (mimetics) or as antagonists. Variants can be generated by mutagenesis, e.g., discrete point mutation or truncation. An agonist can retain substantially the same, or a subset, of the biological activities of the naturally occurring form of the protein. An antagonist of a protein can inhibit one or more of the activities of the naturally occurring form of the protein by, for example, competitively binding to a downstream or upstream member of a cellular signaling cascade which includes the protein of interest. Thus, specific biological effects can be elicited by treatment with a variant of limited function. Treatment of a subject with a variant having a subset of the biological activities of the naturally occurring form of the protein can have fewer side effects in a subject relative to treatment with the naturally occurring form of the protein.

[2154] Variants of a protein of the invention which function as either agonists (mimetics) or as antagonists can be identified by screening combinatorial libraries of mutants, e.g., truncation mutants, of the protein of the invention for agonist or antagonist activity. In one embodiment, a variegated library of variants is generated by combinatorial mutagenesis at the nucleic acid level and is encoded by a variegated gene library. A variegated library of variants can be produced by, for example, enzymatically ligating a mixture of synthetic oligonucleotides into gene sequences such that a degenerate set of potential protein sequences is expressible as individual polypeptides, or alternatively, as a set of larger fusion proteins (e.g., for phage display). There are a variety of methods which can be used to produce libraries of potential variants of the polypeptides of the invention from a degenerate oligonucleotide sequence. Methods for synthesizing degenerate oligonucleotides are known in the art (see, e.g., Narang (1983) Tetrahedron 39:3; Itakura et al. (1984) Annu. Rev. Biochem. 53:323; Itakura et al. (1984) Science 198:1056; Ike et al. (1983) Nucleic Acid Res. 11:477).

[2155] In addition, libraries of fragments of the coding sequence of a polypeptide of the invention can be used to generate a variegated population of polypeptides for screening and subsequent selection of variants. For example, a library of coding sequence fragments can be generated by treating a double stranded PCR fragment of the coding sequence of interest with a nuclease under conditions wherein nicking occurs only about once per molecule, denaturing the double stranded DNA, renaturing the DNA to form double stranded DNA which can include sense/antisense pairs from different nicked products, removing single stranded portions from reformed duplexes by treatment with S1 nuclease, and ligating the resulting fragment library into an expression vector. By this method, an expression library can be derived which encodes N-terminal and internal fragments of various sizes of the protein of interest.

[2156] Several techniques are known in the art for screening gene products of combinatorial libraries made by point mutations or truncation, and for screening cDNA libraries for gene products having a selected property. The most widely used techniques, which are amenable to high through-put analysis, for screening large gene libraries typically include cloning the gene library into replicable expression vectors, transforming appropriate cells with the resulting library of vectors, and expressing the combinatorial genes under conditions in which detection of a desired activity facilitates isolation of the vector encoding the gene whose product was detected. Recursive ensemble mutagenesis (REM), a technique which enhances the frequency of functional mutants in the libraries, can be used in combination with the screening assays to identify variants of a protein of the invention (Arkin and Yourvan (1992) Proc. Natl. Acad. Sci. USA 89:7811-7815; Delgrave et al. (1993) Protein Engineering 6(3):327-331).

[2157] The polypeptides of the invention can exhibit post-translational modifications, including, but not limited to glycosylations, (e.g., N-linked or O-linked glycosylations), myristylations, palmitylations, acetylations and phosphorylations (e.g., serine/threonine or tyrosine). In one embodiment, the INTERCEPT 258, INTERCEPT 307 and INTERCEPT 340, MANGO 003, MANGO 245, MANGO 346, MANGO 347, MANGO 349, and MANGO 511, and TANGO 128, TANGO 136, TANGO 140, TANGO 176, TANGO 197, TANGO 201, TANGO 204, TANGO 206, TANGO 209, TANGO 212, TANGO 213, TANGO 214, TANGO 216, TANGO 221, TANGO 222, TANGO 223, TANGO 224, TANGO 244, TANGO 246, TANGO 253, TANGO 257, TANGO 261, TANGO 262, TANGO 266, TANGO 267, TANGO 272, TANGO 275, TANGO 295, TANGO 315, TANGO 330, TANGO 339, TANGO 354, TANGO 358, TANGO 361, TANGO 365, TANGO 368, TANGO 369, TANGO 378, TANGO 383, TANGO 437, TANGO 480, and TANGO 499 polypeptides of the invention exhibit reduced levels of O-linked glycosylation and/or N-linked glycosylation relative to endogenously expressed polypeptides of the invention do not exhibit O-linked glycosylation or N-linked glycosylation.

[2158] The polypeptides of the invention can, for example, include modifications that can increase such attributes as stability, half-life, ability to enter cells and aid in administration, e.g., in vivo administration of the polypeptides of the invention. For example, polypeptides of the invention can comprise a protein transduction domain of the HIV TAT protein as described in Schwarze, et al. (1999 Science 285:1569-1572), thereby facilitating delivery of polypeptides of the invention into cells.

[2159] An isolated polypeptide of the invention, or a fragment thereof, can be used as an immunogen to generate antibodies using standard techniques for polyclonal and monoclonal antibody preparation. The full-length polypeptide or protein can be used or, alternatively, the invention provides antigenic peptide fragments for use as immunogens. The antigenic peptide of a protein of the invention comprises at least 8 (preferably 10, 15, 20, or 30) amino acid residues of the amino acid sequence of SEQ ID NO: 2, 4, 6, 8, 10, 12, 14, 16, 18, 20, 22, 24, 26, 28, 30, 32, 34, 36, 38, 40, 42, 44, 46, 48, 50, 52, 54, 56, 58, 60, 62, 64, 66, 68, 70, 72, 74, 76, 78, 80, 82, 84, 86, 88, 90, 92, 94, 96, 98, 100, 102, 104, 106, 108, 110, 112, 114, 116, 118, 120, 122, 124, 126, 128, 130, 132, 134, 136, 138, 140, 142, 144, 146, 148, 150, 152, 154, 156, 158, 160, 162, and 164, and encompasses an epitope of the protein such that an antibody raised against the peptide forms a specific immune complex with the protein.

[2160] Preferred epitopes encompassed by the antigenic peptide are regions that are located on the surface of the protein, e.g., hydrophilic regions. These regions can be identified using hydropathy plots as described, for example, in the description of FIGS. 2, 4, 18, 19, 20, 21, 22, 23, 24, 40A, 46, 48, 50, 53, 55, 60, 65, 69, 73, 77, 85, 87, 93, 95, 102, 104, 112, 119, 125, 132, 136, 140, 148, 158, 161, 165, 167, 170, 173, 175, 178, 181, 196, 199, 203, 205, 207, 210, 212, 215, 217, 219, 225, 229, 231, 235, 238, 244, 256 or 259, orby similar analyses can be used to identify hydrophilic regions. In certain embodiments, the nucleic acid molecules of the invention are present as part of nucleic acid molecules comprising nucleic acid sequences that contain or encode heterologous (e.g., vector, expression vector, or fusion protein) sequences. These nucleotides can then be used to express proteins which can be used as immunogens to generate an immune response, or more particularly, to generate polyclonal or monoclonal antibodies specific to the expressed protein.

[2161] An immunogen typically is used to prepare antibodies by immunizing a suitable subject, (e.g., rabbit, goat, mouse or other mammal). An appropriate immunogenic preparation can contain, for example, recombinantly expressed or chemically synthesized polypeptide. The preparation can further include an adjuvant, such as Freund's complete or incomplete adjuvant, or similar immunostimulatory agent.

[2162] Accordingly, another aspect of the invention pertains to antibodies directed against a polypeptide of the invention. The term “antibody” as used herein refers to immunoglobulin molecules and immunologically active portions of immunoglobulin molecules, i.e., molecules that contain an antigen binding site which specifically binds an antigen, such as a polypeptide of the invention, e.g., an epitope of a polypeptide of the invention. A molecule which specifically binds to a given polypeptide of the invention is a molecule which binds the polypeptide, but does not substantially bind other molecules in a sample, e.g., a biological sample, which naturally contains the polypeptide. Examples of immunologically active portions of immunoglobulin molecules include F(ab) and F(ab′)₂ fragments which can be generated by treating the antibody with an enzyme such as pepsin. The invention provides polyclonal and monoclonal antibodies. The term “monoclonal antibody” or “monoclonal antibody composition”, as used herein, refers to a population of antibody molecules that contain only one species of an antigen binding site capable of immunoreacting with a particular epitope.

[2163] Polyclonal antibodies can be prepared as described above by immunizing a suitable subject with a polypeptide of the invention as an immunogen. Preferred polyclonal antibody compositions are ones that have been selected for antibodies directed against a polypeptide or polypeptides of the invention. Particularly preferred polyclonal antibody preparations are ones that contain only antibodies directed against a polypeptide or polypeptides of the invention. Particularly preferred immunogen compositions are those that contain no other human proteins such as, for example, immunogen compositions made using a non-human host cell for recombinant expression of a polypeptide of the invention. In such a manner, the only human epitope or epitopes recognized by the resulting antibody compositions raised against this immunogen will be present as part of a polypeptide or polypeptides of the invention.

[2164] The antibody titer in the immunized subject can be monitored over time by standard techniques, such as with an enzyme linked immunosorbent assay (ELISA) using immobilized polypeptide. If desired, the antibody molecules can be isolated from the mammal (e.g., from the blood) and further purified by well-known techniques, such as protein A chromatography to obtain the IgG fraction. Alternatively, antibodies specific for a protein or polypeptide of the invention can be selected for (e.g., partially purified) or purified by, e.g., affinity chromatography. For example, a recombinantly expressed and purified (or partially purified) protein of the invention is produced as described herein, and covalently or non-covalently coupled to a solid support such as, for example, a chromatography column. The column can then be used to affinity purify antibodies specific for the proteins of the invention from a sample containing antibodies directed against a large number of different epitopes, thereby generating a substantially purified antibody composition, i.e., one that is substantially free of contaminating antibodies. By a substantially purified antibody composition is meant, in this context, that the antibody sample contains at most only 30% (by dry weight) of contaminating antibodies directed against epitopes other than those on the desired protein or polypeptide of the invention, and preferably at most 20%, yet more preferably at most 10%, and most preferably at most 5% (by dry weight) of the sample is contaminating antibodies. A purified antibody composition means that at least 99% of the antibodies in the composition are directed against the desired protein or polypeptide of the invention.

[2165] At an appropriate time after immunization, e.g., when the specific antibody titers are highest, antibody-producing cells can be obtained from the subject and used to prepare monoclonal antibodies by standard techniques, such as the hybridoma technique originally described by Kohler and Milstein (1975) Nature 256:495-497, the human B cell hybridoma technique (Kozbor et al. (1983) Immunol. Today 4:72), the EBV-hybridoma technique (Cole et al. (1985), Monoclonal Antibodies and Cancer Therapy, Alan R. Liss, Inc., pp. 77-96) or trioma techniques. The technology for producing hybridomas is well known (see generally Current Protocols in Immunology (1994) Coligan et al. (eds.) John Wiley & Sons, Inc., New York, N.Y.). Hybridoma cells producing a monoclonal antibody of the invention are detected by screening the hybridoma culture supernatants for antibodies that bind the polypeptide of interest, e.g., using a standard ELISA assay.

[2166] Alternative to preparing monoclonal antibody-secreting hybridomas, a monoclonal antibody directed against a polypeptide of the invention can be identified and isolated by screening a recombinant combinatorial immunoglobulin library (e.g., an antibody phage display library) with the polypeptide of interest. Kits for generating and screening phage display libraries are commercially available (e.g., the Pharmacia Recombinant Phage Antibody System, Catalog No. 27-9400-01; and the Stratagene SurfZAP Phage Display Kit, Catalog No. 240612). Additionally, examples of methods and reagents particularly amenable for use in generating and screening antibody display library can be found in, for example, U.S. Pat. No. 5,223,409; PCT Publication No. WO 92/18619; PCT Publication No. WO 91/17271; PCT Publication No. WO 92/20791; PCT Publication No. WO 92/15679; PCT Publication No. WO 93/01288; PCT Publication No. WO 92/01047; PCT Publication No. WO 92/09690; PCT Publication No. WO 90/02809; Fuchs et al. (1991) BiolTechnology 9:1370-1372; Hay et al. (1992) Hum. Antibod. Hybridomas 3:81-85; Huse et al. (1989) Science 246:1275-1281; Griffiths et al. (1993) EMBO J. 12:725-734.

[2167] Additionally, recombinant antibodies, such as chimeric and humanized monoclonal antibodies, comprising both human and non-human portions, which can be made using standard recombinant DNA techniques, are within the scope of the invention. A chimeric antibody is a molecule in which different portions are derived from different animal species, such as those having a variable region derived from a murine mAb and a human immunoglobulin constant region. (See, e.g., Cabilly et al., U.S. Pat. No. 4,816,567; and Boss et al., U.S. Pat. No. 4,816,397, which are incorporated herein by reference in their entirety.) Humanized antibodies are antibody molecules from non-human species having one or more complementarily determining regions (CDRs) from the non-human species and a framework region from a human immunoglobulin molecule. (See, e.g., Queen, U.S. Pat. No. 5,585,089, which is incorporated herein by reference in its entirety.) Such chimeric and humanized monoclonal antibodies can be produced by recombinant DNA techniques known in the art, for example using methods described in PCT Publication No. WO 87/02671; European Patent Application 184,187; European Patent Application 171,496; European Patent Application 173,494; PCT Publication No. WO 86/01533; U.S. Pat. No. 4,816,567; European Patent Application 125,023; Better et al. (1988) Science 240:1041-1043; Liu et al. (1987) Proc. Natl. Acad. Sci. USA 84:3439-3443; Liu et al. (1987) J. Immunol. 139:3521-3526; Sun et al. (1987) Proc. Nati. Acad. Sci. USA 84:214-218; Nishimura et al. (1987) Canc. Res. 47:999-1005; Wood et al. (1985) Nature 314:446-449; and Shaw et al. (1988) J. Natl. Cancer Inst. 80:1553-1559); Morrison (1985) Science 229:1202-1207; Oi et al. (1986) Bio/Techniques 4:214; U.S. Patent 5,225,539; Jones et al. (1986) Nature 321:552-525; Verhoeyan et al. (1988) Science 239:1534; and Beidler et al. (1988) J. Immunol. 141:4053-4060.

[2168] Completely human antibodies are particularly desirable for therapeutic treatment of human patients. Such antibodies can be produced, for example, using transgenic mice which are incapable of expressing endogenous immunoglobulin heavy and light chains genes, but which can express human heavy and light chain genes. The transgenic mice are immunized in the normal fashion with a selected antigen, e.g., all or a portion of a polypeptide of the invention. Monoclonal antibodies directed against the antigen can be obtained using conventional hybridoma technology. The human immunoglobulin transgenes harbored by the transgenic mice rearrange during B cell differentiation, and subsequently undergo class switching and somatic mutation. Thus, using such a technique, it is possible to produce therapeutically useful IgG, IgA and IgE antibodies. For an overview of this technology for producing human antibodies, see Lonberg and Huszar (1995, Int. Rev. Immunol. 13:65-93). For a detailed discussion of this technology for producing human antibodies and human monoclonal antibodies and protocols for producing such antibodies, see, e.g., U.S. Pat. Nos. 5,625,126; 5,633,425; 5,569,825; 5,661,016; and 5,545,806. In addition, companies such as Abgenix, Inc. (Freemont, Calif.), can be engaged to provide human antibodies directed against a selected antigen using technology similar to that described above.

[2169] Completely human antibodies which recognize a selected epitope can be generated using a technique referred to as “guided selection.” In this approach a selected non-human monoclonal antibody, e.g., a murine antibody, is used to guide the selection of a completely human antibody recognizing the same epitope. (Jespers et al. (1994) Bio/technology 12:899-903).

[2170] An antibody directed against a polypeptide of the invention (e.g., monoclonal antibody) can be used to isolate the polypeptide by standard techniques, such as affinity chromatography or immunoprecipitation. Moreover, such an antibody can be used to detect the protein (e.g., in a cellular lysate or cell supernatant) in order to evaluate the abundance and pattern of expression of the polypeptide. The antibodies can also be used diagnostically to monitor protein levels in tissue as part of a clinical testing procedure, e.g., to, for example, determine the efficacy of a given treatment regimen. Detection can be facilitated by coupling the antibody to a detectable substance. Examples of detectable substances include various enzymes, prosthetic groups, fluorescent materials, luminescent materials, bioluminescent materials, and radioactive materials. Examples of suitable enzymes include horseradish peroxidase, alkaline phosphatase, beta-galactosidase, or acetylcholinesterase; examples of suitable prosthetic group complexes include streptavidin/biotin and avidin/biotin; examples of suitable fluorescent materials include umbelliferone, fluorescein, fluorescein isothiocyanate, rhodamine, dichlorotriazinylamine fluorescein, dansyl chloride or phycoerythrin; an example of a luminescent material includes luminol; examples of bioluminescent materials include luciferase, luciferin, and aequorin, and examples of suitable radioactive material include ¹²⁵I, ¹³¹I, ³⁵S or ³H.

[2171] In addition, the gene sequences and gene products of the invention, including peptide fragments and fusion proteins thereof, and antibodies directed against said gene products and peptide fragments thereof, have applications for purposes independent of the role of the gene products, as described above. For example, INTERCEPT 258, INTERCEPT 307 and INTERCEPT 340, MANGO 003, MANGO 245, MANGO 346, MANGO 347, MANGO 349, and MANGO 511, and TANGO 128, TANGO 136, TANGO 140, TANGO 176, TANGO 197, TANGO 201, TANGO 204, TANGO 206, TANGO 209, TANGO 212, TANGO 213, TANGO 214, TANGO 216, TANGO 221, TANGO 222, TANGO 223, TANGO 224, TANGO 244, TANGO 246, TANGO 253, TANGO 257, TANGO 261, TANGO 262, TANGO 266, TANGO 267, TANGO 272, TANGO 275, TANGO 295, TANGO 315, TANGO 330, TANGO 339, TANGO 354, TANGO 358, TANGO 361, TANGO 365, TANGO 368, TANGO 369, TANGO 378, TANGO 383, TANGO 437, TANGO 480, and TANGO 499 gene products, including peptide fragments, as well as specific antibodies thereto, can be used for construction of fusion proteins to facilitate recovery, detection, or localization of another protein of interest. In addition, genes and gene products of the invention can be used for genetic mapping. Finally, nucleic acids and gene products of the invention have generic uses, such as supplemental sources of nucleic acids, proteins and amino acids for food additives or cosmetic products.

[2172] Further, an antibody (or fragment thereof) may be conjugated to a therapeutic moiety such as a cytotoxin, a therapeutic agent or a radioactive metal ion. A cytotoxin or cytotoxic agent includes any agent that is detrimental to cells. Examples include taxol, cytochalasin B, gramicidin D, ethidium bromide, emetine, mitomycin, etoposide, tenoposide, vincristine, vinblastine, colchicin, doxorubicin, daunorubicin, dihydroxy anthracin dione, mitoxantrone, mithramycin, actinomycin D, 1-dehydrotestosterone, glucocorticoids, procaine, tetracaine, lidocaine, propranolol, and puromycin and analogs or homologs thereof. Therapeutic agents include, but are not limited to, antimetabolites (e.g., methotrexate, 6-mercaptopurine, 6-thioguanine, cytarabine, 5-fluorouracil decarbazine), alkylating agents (e.g., mechlorethamine, thioepa chlorambucil, melphalan, carmustine (BSNU) and lomustine (CCNU), cyclothosphamide, busulfan, dibromomannitol, streptozotocin, mitomycin C, and cis-dichlorodiamine platinum (II) (DDP) cisplatin), anthracyclines (e.g., daunorubicin (formerly daunomycin) and doxorubicin), antibiotics (e.g., dactinomycin (formerly actinomycin), bleomycin, mithramycin, and anthramycin (AMC)), and anti-mitotic agents (e.g., vincristine and vinblastine).

[2173] The conjugates of the invention can be used for modifying a given biological response, the drug moiety is not to be construed as limited to classical chemical therapeutic agents. For example, the drug moiety may be a protein or polypeptide possessing a desired biological activity. Such proteins may include, for example, a toxin such as abrin, ricin A, pseudomonas exotoxin, or diphtheria toxin; a protein such as tumor necrosis factor, α-interferon, β-interferon, nerve growth factor, platelet derived growth factor, tissue plasminogen activator, a thrombotic agent or an anti-angiogenic agent, e.g., angiostatin or endostatin; or, biological response modifiers such as, for example, lymphokines, interleukin-1 (“IL-1”), interleukin-2 (“IL-2”), interleukin-4 (“IL-4”) interleukin-6 (“IL-6”), interleukin-(“IL-7”), granulocyte macrophase colony stimulating factor (“GM-CSF”), granulocyte colony stimulating factor (“G-CSF”), interleukin-10 (“IL-10”), interleukin-12 (“IL-12”), interleukin-15 (“IL-15”), interferon-γ (“IFN-γ”), interferon-α (“IFN-α”), or other immune factors or growth factors.

[2174] Techniques for conjugating such therapeutic moiety to antibodies are well known, see, e.g., Arnon et al., “Monoclonal Antibodies For Immunotargeting Of Drugs In Cancer Therapy”, in Monoclonal Antibodies And Cancer Therapy, Reisfeld et al. (eds.), pp. 243-56 (Alan R. Liss, Inc. 1985); Hellstrom et al., “Antibodies For Drug Delivery”, in Controlled Drug Delivery (2nd Ed.), Robinson et al. (eds.), pp. 623-53 (Marcel Dekker, Inc. 1987); Thorpe, “Antibody Carriers Of Cytotoxic Agents In Cancer Therapy: A Review”, in Monoclonal Antibodies '84: Biological And Clinical Applications, Pinchera et al. (eds.), pp. 475-506 (1985); “Analysis, Results, And Future Prospective Of The Therapeutic Use Of Radiolabeled Antibody In Cancer Therapy”, in Monoclonal Antibodies For Cancer Detection And Therapy, Baldwin et al. (eds.), pp. 303-16 (Academic Press 1985), and Thorpe et al., “The Preparation And Cytotoxic Properties Of Antibody-Toxin Conjugates”, Immunol. Rev., 62:119-58 (1982).

[2175] Alternatively, an antibody can be conjugated to a second antibody to form an antibody heteroconjugate as described by Segal in U.S. Pat. No. 4,676,980.

[2176] An antibody with or without a therapeutic moiety conjugated to it can be used as a therapeutic that is administered alone or in combination with chemotherapeutic agents.

[2177] Alternatively, an antibody of the invention can be conjugated to a second antibody to form an “antibody heteroconjugate” as described by Segal in U.S. Pat. No. 4,676,980 or alternatively, the antibodies can be conjugated to form an “antibody heteropolymer” as described in Taylor et al., in U.S. Pat. Nos. 5,470,570 and 5,487,890.

[2178] An antibody with or without a therapeutic moiety conjugated to it can be used as a therapeutic that is administered alone or in combination with cytotoxic factor(s) and/or cytokine(s).

[2179] In yet a further aspect, the invention provides substantially purified antibodies or fragments thereof, including human or non-human antibodies or fragments thereof, which antibodies or fragments specifically bind to a polypeptide of the invention comprising an amino acid sequence selected from the group consisting of: the amino acid sequence of SEQ ID NO: 2, 4, 6, 8, 10, 12, 14, 16, 18, 20, 22, 24, 26, 28, 30, 32, 34, 36, 38, 40, 42, 44, 46, 48, 50, 52, 54, 56, 58, 60, 62, 64, 66, 68, 70, 72, 74, 76, 78, 80, 82, 84, 86, 88, 90, 92, 94, 96, 98, 100, 102, 104, 106, 108, 110, 112, 114, 116, 118, 120, 122, 124, 126, 128, 130, 132, 134, 136, 138, 140, 142, 144, 146, 148, 150, 152, 154, 156, 158, 160, 162, and 164, or the amino acid sequence encoded by the cDNA insert of the plasmid deposited on Oct. 1, 1999 with the ATCC® and having the deposit number 98880, 98999, 202171, 98965, 98966, 98899, 207042, 207044, 207043, 207081, 207176, 207222, 207215, 207217, 207221, 207192, 207189, 207223, 207221, 207220, PTA-250, 207178, PTA-250, PTA-249, PTA-292, PTA-291, PTA-295, PTA-455, PTA-438, PTA-454, PTA-425, and PTA-816; a fragment of at least 15 contiguous amino acid residues of the amino acid sequence of SEQ ID NO: 2, 4, 6, 8, 10, 12, 14, 16, 18, 20, 22, 24, 26, 28, 30, 32, 34, 36, 38, 40, 42, 44, 46, 48, 50, 52, 54, 56, 58, 60, 62, 64, 66, 68, 70, 72, 74, 76, 78, 80, 82, 84, 86, 88, 90, 92, 94, 96, 98, 100, 102, 104, 106, 108, 110, 112, 114, 116, 118, 120, 122, 124, 126, 128, 130, 132, 134, 136, 138, 140, 142, 144, 146, 148, 150, 152, 154, 156, 158, 160, 162, and 164, or the amino acid sequence encoded by the cDNA insert of the plasmid deposited with the ATCC® deposit number 98880, 98999, 202171, 98965, 98966, 98899, 207042, 207044, 207043, 207081, 207176, 207222, 207215, 207217, 207221, 207192, 207189, 207223, 207221, 207220, PTA-250, 207178, PTA-250, PTA-249, PTA-292, PTA-291, PTA-295, PTA-455, PTA-438, PTA-454, PTA-425, and PTA-816; an amino acid sequence which is at least 95% identical to the amino acid sequence of SEQ ID NO: 2, 4, 6, 8, 10, 12, 14, 16, 18, 20, 22, 24, 26, 28, 30, 32, 34, 36, 38, 40, 42, 44, 46, 48, 50, 52, 54, 56, 58, 60, 62, 64, 66, 68, 70, 72, 74, 76, 78, 80, 82, 84, 86, 88, 90, 92, 94, 96, 98, 100, 102, 104, 106, 108, 110, 112, 114, 116, 118, 120, 122, 124, 126, 128, 130, 132, 134, 136, 138, 140, 142, 144, 146, 148, 150, 152, 154, 156, 158, 160, 162, and 164, or the amino acid sequence encoded by the cDNA insert of the plasmid deposited with the ATCC® deposit number 98880, 98999, 202171, 98965, 98966, 98899, 207042, 207044, 207043, 207081, 207176, 207222, 207215, 207217, 207221, 207192, 207189, 207223, 207221, 207220, PTA-250, 207178, PTA-250, PTA-249, PTA-292, PTA-291, PTA-295, PTA-455, PTA-438, PTA-454, PTA-425, and PTA-816, wherein the percent identity is determined using the ALIGN program of the GCG software package with a PAM120 weight residue table, a gap length penalty of 12, and a gap penalty of 4; and an amino acid sequence which is encoded by a nucleic acid molecule which hybridizes to the nucleic acid molecule consisting of SEQ ID NO: 1, 3, 5, 7, 9, 11, 13, 15, 17, 19, 21, 23, 25, 27, 29, 31, 33, 35, 37, 39, 41, 43, 45, 47, 49, 51, 53, 55, 57, 59, 61, 63, 65, 67, 69, 71, 73, 75, 77, 79, 81, 83, 85, 87, 89, 91, 93, 95, 97, 99, 101, 103, 105, 107, 109, 111, 113, 115, 117, 119, 121, 123, 125, 127, 129, 131, 133, 135, 137, 139, 141, 143, 145, 147, 149, 151, 153, 155, 157, 159, 161, and 163, or to the cDNA insert of the plasmid deposited with the ATCC® deposit number 98880, 98999, 202171, 98965, 98966, 98899, 207042, 207044, 207043, 207081, 207176, 207222, 207215, 207217, 207221, 207192, 207189, 207223, 207221, 207220, PTA-250, 207178, PTA-250, PTA-249, PTA-292, PTA-291, PTA-295, PTA-455, PTA-438, PTA-454, PTA-425, and PTA-816, under conditions of hybridization of 6×SSC at 45° C. and washing in 0.2×SSC, 0.1% SDS at 65° C. In various embodiments, the substantially purified antibodies of the invention, or fragments thereof, can be human, non-human, chimeric and/or humanized antibodies.

[2180] In another aspect, the invention provides human or non-human antibodies or 30 fragments thereof, which antibodies or fragments specifically bind to a polypeptide comprising an amino acid sequence selected from the group consisting of: the amino acid sequence of SEQ ID NO: 2, 4, 6, 8, 10, 12, 14, 16, 18, 20, 22, 24, 26, 28, 30, 32, 34, 36, 38, 40, 42, 44, 46, 48, 50, 52, 54, 56, 58, 60, 62, 64, 66, 68, 70, 72, 74, 76, 78, 80, 82, 84, 86, 88, 90, 92, 94, 96, 98, 100, 102, 104, 106, 108, 110, 112, 114, 116, 118, 120, 122, 124, 126, 128, 130, 132, 134, 136, 138, 140, 142, 144, 146, 148, 150, 152, 154, 156, 158, 160, 162, and 164, or the amino acid sequence encoded by the cDNA insert of the plasmid deposited with the ATCC® deposit number 98880, 98999, 202171, 98965, 98966, 98899, 207042, 207044, 207043, 207081, 207176, 207222, 207215, 207217, 207221, 207192, 207189, 207223, 207221, 207220, PTA-250, 207178, PTA-250, PTA-249, PTA-292, PTA-291, PTA-295, PTA-455, PTA-438, PTA-454, PTA-425, and PTA-816; a fragment of at least 15 contiguous amino acid residues of the amino acid sequence of SEQ ID NO: 2, 4, 6, 8, 10, 12, 14, 16, 18, 20, 22, 24, 26, 28, 30, 32, 34, 36, 38, 40, 42, 44, 46, 48, 50, 52, 54, 56, 58, 60, 62, 64, 66, 68, 70, 72, 74, 76, 78, 80, 82, 84, 86, 88, 90, 92, 94, 96, 98, 100, 102, 104, 106, 108, 110, 112, 114, 116, 118, 120, 122, 124, 126, 128, 130, 132, 134, 136, 138, 140, 142, 144, 146, 148, 150, 152, 154, 156, 158, 160, 162, and 164, or the amino acid sequence encoded by the cDNA insert of the plasmid deposited with the ATCC® deposit number 98880, 98999, 202171, 98965, 98966, 98899, 207042, 207044, 207043, 207081, 207176, 207222, 207215, 207217, 207221, 207192, 207189, 207223, 207221, 207220, PTA-250, 207178, PTA-250, PTA-249, PTA-292, PTA-291, PTA-295, PTA-455, PTA-438, PTA-454, PTA-425, and PTA-816; an amino acid sequence which is at least 95% identical to the amino acid sequence of SEQ ID NO: 2, 4, 6, 8, 10, 12, 14, 16, 18, 20, 22, 24, 26, 28, 30, 32, 34, 36, 38, 40, 42, 44, 46, 48, 50, 52, 54, 56, 58, 60, 62, 64, 66, 68, 70, 72, 74, 76, 78, 80, 82, 84, 86, 88, 90, 92, 94, 96, 98, 100, 102, 104, 106, 108, 110, 112, 114, 116, 118, 120, 122, 124, 126, 128, 130, 132, 134, 136, 138, 140, 142, 144, 146, 148, 150, 152, 154, 156, 158, 160, 162, and 164, or the amino acid sequence encoded by the cDNA insert of the plasmid deposited with the ATCC® deposit number 98880, 98999, 202171, 98965, 98966, 98899, 207042, 207044, 207043, 207081, 207176, 207222, 207215, 207217, 207221, 207192, 207189, 207223, 207221, 207220, PTA-250, 207178, PTA-250, PTA-249, PTA-292, PTA-291, PTA-295, PTA-455, PTA-438, PTA-454, PTA-425, and PTA-816, wherein the percent identity is determined using the ALIGN program of the GCG software package with a PAM120 weight residue table, a gap length penalty of 12, and a gap penalty of 4; and an amino acid sequence which is encoded by a nucleic acid molecule which hybridizes to the nucleic acid molecule consisting of SEQ ID NO: 1, 3, 5, 7, 9, 11, 13, 15, 17, 19, 21, 23, 25, 27, 29, 31, 33, 35, 37, 39, 41, 43, 45, 47, 49, 51, 53, 55, 57, 59, 61, 63, 65, 67, 69, 71, 73, 75, 77, 79, 81, 83, 85, 87, 89, 91, 93, 95, 97, 99, 101, 103, 105, 107, 109, 111, 113, 115, 117, 119, 121, 123, 125, 127, 129, 131, 133, 135, 137, 139, 141, 143, 145, 147, 149, 151, 153, 155, 157, 159, 161, and 163, or to the cDNA insert of the plasmid deposited with the ATCC® deposit number 98880, 98999, 202171, 98965, 98966, 98899, 207042, 207044, 207043, 207081, 207176, 207222, 207215, 207217, 207221, 207192, 207189, 207223, 207221, 207220, PTA-250, 207178, PTA-250, PTA-249, PTA-292, PTA-291, PTA-295, PTA-455, PTA-438, PTA-454, PTA-425, and PTA-816, under conditions of hybridization of 6×SSC at 45° C. and washing in 0.2×SSC, 0.1% SDS at 65° C. Such non-human antibodies can be goat, mouse, sheep, horse, chicken, rabbit, or rat antibodies. Alternatively, the non-human antibodies of the invention can be chimeric and/or humanized antibodies. In addition, the non-human antibodies of the invention can be polyclonal antibodies or monoclonal antibodies.

[2181] In still a further aspect, the invention provides monoclonal antibodies or fragments thereof, which antibodies or fragments specifically bind to a polypeptide of the invention comprising an amino acid sequence selected from the group consisting of: the amino acid sequence of SEQ ID NO: 2, 4, 6, 8, 10, 12, 14, 16, 18, 20, 22, 24, 26, 28, 30, 32, 34, 36, 38, 40, 42, 44, 46, 48, 50, 52, 54, 56, 58, 60, 62, 64, 66, 68, 70, 72, 74, 76, 78, 80, 82, 84, 86, 88, 90, 92, 94, 96, 98, 100, 102, 104, 106, 108, 110, 112, 114, 116, 118, 120, 122, 124, 126, 128, 130, 132, 134, 136, 138, 140, 142, 144, 146, 148, 150, 152, 154, 156, 158, 160, 162, and 164, or the amino acid sequence encoded by the cDNA insert of the plasmid deposited with the ATCC® deposit number 98880, 98999, 202171, 98965, 98966, 98899, 207042, 207044, 207043, 207081, 207176, 207222, 207215, 207217, 207221, 207192, 207189, 207223, 207221, 207220, PTA-250, 207178, PTA-250, PTA-249, PTA-292, PTA-291, PTA-295, PTA-455, PTA-438, PTA-454, PTA-425, and PTA-816; a fragment of at least 15 contiguous amino acid residues of the amino acid sequence of SEQ ID NO: 2, 4, 6, 8, 10, 12, 14, 16, 18, 20, 22, 24, 26, 28, 30, 32, 34, 36, 38, 40, 42, 44, 46, 48, 50, 52, 54, 56, 58, 60, 62, 64, 66, 68, 70, 72, 74, 76, 78, 80, 82, 84, 86, 88, 90, 92, 94, 96, 98, 100, 102, 104, 106, 108, 110, 112, 114, 116, 118, 120, 122, 124, 126, 128, 130, 132, 134, 136, 138, 140, 142, 144, 146, 148, 150, 152, 154, 156, 158, 160, 162, and 164, or the amino acid sequence encoded by the cDNA insert of the plasmid deposited with the ATCC® deposit number 98880, 98999, 202171, 98965, 98966, 98899, 207042, 207044, 207043, 207081, 207176, 207222, 207215, 207217, 207221, 207192, 207189, 207223, 207221, 207220, PTA-250, 207178, PTA-250, PTA-249, PTA-292, PTA-291, PTA-295, PTA-455, PTA-438, PTA-454, PTA-425, and PTA-816; an amino acid sequence which is at least 95% identical to the amino acid sequence of SEQ ID NO: 2, 4, 6, 8, 10, 12, 14, 16, 18, 20, 22, 24, 26, 28, 30, 32, 34, 36, 38, 40, 42, 44, 46, 48, 50, 52, 54, 56, 58, 60, 62, 64, 66, 68, 70, 72, 74, 76, 78, 80 , 82, 84, 86, 88, 90, 92, 94, 96, 98, 100, 102, 104, 106, 108, 110, 112, 114, 116, 118, 120, 122, 124, 126, 128, 130, 132, 134, 136, 138, 140, 142, 144, 146, 148, 150, 152, 154, 156, 158, 160, 162, and 164, or the amino acid sequence encoded by the cDNA insert of the plasmid deposited with the ATCC® deposit number 98880, 98999, 202171, 98965, 98966, 98899, 207042, 207044, 207043, 207081, 207176, 207222, 207215, 207217, 207221, 207192, 207189, 207223, 207221, 207220, PTA-250, 207178, PTA-250, PTA-249, PTA-292, PTA-291, PTA-295, PTA-455, PTA-438, PTA-454, PTA-425, and PTA-816, wherein the percent identity is determined using the ALIGN program of the GCG software package with a PAM120 weight residue table, a gap length penalty of 12, and a gap penalty of 4; and an amino acid sequence which is encoded by a nucleic acid molecule which hybridizes to the nucleic acid molecule consisting of SEQ ID NO: 1, 3, 5, 7, 9, 11, 13, 15, 17, 19, 21, 23, 25, 27, 29, 31, 33, 35, 37, 39, 41, 43, 45, 47, 49, 51, 53, 55, 57, 59, 61, 63, 65, 67, 69, 71, 73, 75, 77, 79, 81, 83, 85, 87, 89, 91, 93, 95, 97, 99, 101, 103, 105, 107, 109, 111, 113, 115, 117, 119, 121, 123, 125, 127, 129, 131, 133, 135, 137, 139, 141, 143, 145, 147, 149, 151, 153, 155, 157, 159, 161, and 163, or the cDNA insert of the plasmid deposited with the ATCC® deposit number 98880, 98999, 202171, 98965, 98966, 98899, 207042, 207044, 207043, 207081, 207176, 207222, 207215, 207217, 207221, 207192, 207189, 207223, 207221, 207220, PTA-250, 207178, PTA-250, PTA-249, PTA-292, PTA-291, PTA-295, PTA-455, PTA-438, PTA-454, PTA-425, and PTA-816, under conditions of hybridization of 6×SSC at 45° C. and washing in 0.2×SSC, 0.1% SDS at 65° C. The monoclonal antibodies can be human, humanized, chimeric and/or non-human antibodies.

[2182] The substantially purified antibodies or fragments thereof specifically bind to a signal peptide, a secreted sequence, an extracellular domain, a transmembrane or a cytoplasmic domain cytoplasmic membrane of a polypeptide of the invention. In a particularly preferred embodiment, the substantially purified antibodies or fragments thereof, the non-human antibodies or fragments thereof, and/or the monoclonal antibodies or fragments thereof, of the invention specifically bind to a secreted sequence, or alternatively, to an extracellular domain of the amino acid sequence of the invention.

[2183] Any of the antibodies of the invention can be conjugated to a therapeutic moiety or to a detectable substance. Non-limiting examples of detectable substances that can be conjugated to the antibodies of the invention are an enzyme, a prosthetic group, a fluorescent material, a luminescent material, a bioluminescent material, and a radioactive material.

[2184] The invention also provides a kit containing an antibody of the invention conjugated to a detectable substance, and instructions for use. Still another aspect of the invention is a pharmaceutical composition comprising an antibody of the invention and a pharmaceutically acceptable carrier. In preferred embodiments, the pharmaceutical composition contains an antibody of the invention, a therapeutic moiety, and a pharmaceutically acceptable carrier.

[2185] Still another aspect of the invention is a method of making an antibody that specifically recognizes INTERCEPT 258, INTERCEPT 307 and INTERCEPT 340, MANGO 003, MANGO 245, MANGO 346, MANGO 347, MANGO 349, and MANGO 511, and TANGO 128, TANGO 136, TANGO 140, TANGO 176, TANGO 197, TANGO 201, TANGO 204, TANGO 206, TANGO 209, TANGO 212, TANGO 213, TANGO 214, TANGO 216, TANGO 221, TANGO 222, TANGO 223, TANGO 224, TANGO 244, TANGO 246, TANGO 253, TANGO 257, TANGO 261, TANGO 262, TANGO 266, TANGO 267, TANGO 272, TANGO 275, TANGO 295, TANGO 315, TANGO 330, TANGO 339, TANGO 354, TANGO 358, TANGO 361, TANGO 365, TANGO 368, TANGO 369, TANGO 378, TANGO 383, TANGO 437, TANGO 480, and TANGO 499 polypeptides, derivatives thereof or fragments thereof, the method comprising immunizing a mammal with a polypeptide or polypeptide fragment. The polypeptide used as an immunogen comprises an amino acid sequence selected from the group consisting of: the amino acid sequence of any one of SEQ ID NO: 2, 4, 6, 8, 10, 12, 14, 16, 18, 20, 22, 24, 26, 28, 30, 32, 34, 36, 38, 40, 42, 44, 46, 48, 50, 52, 54, 56, 58, 60, 62, 64, 66, 68, 70, 72, 74, 76, 78, 80, 82, 84, 86, 88, 90, 92, 94, 96, 98, 100, 102, 104, 106, 108, 110, 112, 114, 116, 118, 120, 122, 124, 126, 128, 130, 132, 134, 136, 138, 140, 142, 144, 146, 148, 150, 152, 154, 156, 158, 160, 162, and 164, or an amino acid sequence encoded by the cDNA of a clone deposited as ATCC® deposit number 98880, 98999, 202171, 98965, 98966, 98899, 207042, 207044, 207043, 207081, 207176, 207222, 207215, 207217, 207221, 207192, 207189, 207223, 207221, 207220, PTA-250, 207178, PTA-250, PTA-249, PTA-292, PTA-291, PTA-295, PTA-455, PTA-438, PTA-454, PTA-425, and PTA-816; a fragment of at least 15 contiguous amino acid residues of the amino acid sequence of any one of SEQ ID NO: 2, 4, 6, 8, 10, 12, 14, 16, 18, 20, 22, 24, 26, 28, 30, 32, 34, 36, 38, 40, 42, 44, 46, 48, 50, 52, 54, 56, 58, 60, 62, 64, 66, 68, 70, 72, 74, 76, 78, 80, 82, 84, 86, 88, 90, 92, 94, 96, 98, 100, 102, 104, 106, 108, 110, 112, 114, 116, 118, 120, 122, 124, 126, 128, 130, 132, 134, 136, 138, 140, 142, 144, 146, 148, 150, 152, 154, 156, 158, 160, 162, and 164, an amino acid sequence which is at least 95% identical to the amino acid sequence of any one of SEQ ID NO: 2, 4, 6, 8, 10, 12, 14, 16, 18, 20, 22, 24, 26, 28, 30, 32, 34, 36, 38, 40, 42, 44, 46, 48, 50, 52, 54, 56, 58, 60, 62, 64, 66, 68, 70, 72, 74, 76, 78, 80, 82, 84, 86, 88, 90, 92, 94, 96, 98, 100, 102, 104, 106, 108, 110, 112, 114, 116, 118, 120, 122, 124, 126, 128, 130, 132, 134, 136, 138, 140, 142, 144, 146, 148, 150, 152, 154, 156, 158, 160, 162, and 164, wherein the percent identity is determined using the ALIGN program of the GCG software package with a PAM120 weight residue table, a gap length penalty of 12, and a gap penalty of 4; and an amino acid sequence which is encoded by a nucleic acid molecule which hybridizes to the nucleic acid molecule consisting of any one of SEQ ID NO: 1, 3, 5, 7, 9, 11, 13, 15, 17, 19, 21, 23, 25, 27, 29, 31, 33, 35, 37, 39, 41, 43, 45, 47, 49, 51, 53, 55, 57, 59, 61, 63, 65, 67, 69, 71, 73, 75, 77, 79, 81, 83, 85, 87, 89, 91, 93, 95, 97, 99, 101, 103, 105, 107, 109, 111, 113, 115, 117, 119, 121, 123, 125, 127, 129, 131, 133, 135, 137, 139, 141, 143, 145, 147, 149, 151, 153, 155, 157, 159, 161, and 163, or the cDNA of a clone deposited as ATCC® deposit number 98880, 98999, 202171, 98965, 98966, 98899, 207042, 207044, 207043, 207081, 207176, 207222, 207215, 207217, 207221, 207192, 207189, 207223, 207221, 207220, PTA-250, 207178, PTA-250, PTA-249, PTA-292, PTA-291, PTA-295, PTA-455, PTA-438, PTA-454, PTA-425, and PTA-816, or a complement thereof, under conditions of hybridization of 6×SSC at 45° C. and washing in 0.2×SSC, 0.1% SDS at 65° C. After immunization, a sample is collected from the mammal that contains an antibody that specifically recognizes the immunogen. Preferably, the polypeptide is recombinantly produced using a non-human host cell. Optionally, the antibodies can be further purified from the sample using techniques well known to those of skill in the art. The method can further comprise producing a monoclonal antibody-producing cell from the cells of the mammal. Optionally, antibodies are collected from the antibody-producing cell.

[2186] III. Recombinant Expression Vectors and Host Cells

[2187] Another aspect of the invention pertains to vectors, preferably expression vectors, containing a nucleic acid encoding a polypeptide of the invention (or a portion thereof). As used herein, the term “vector” refers to a nucleic acid molecule capable of transporting another nucleic acid to which it has been linked. One type of vector is a “plasmid”, which refers to a circular double stranded DNA loop into which additional DNA segments can be ligated. Another type of vector is a viral vector, wherein additional DNA segments can be ligated into the viral genome. Certain vectors are capable of autonomous replication in a host cell into which they are introduced (e.g., bacterial vectors having a bacterial origin of replication and episomal mammalian vectors). Other vectors (e.g., non-episomal mammalian vectors) are integrated into the genome of a host cell upon introduction into the host cell, and thereby are replicated along with the host genome. Moreover, certain vectors, expression vectors, are capable of directing the expression of genes to which they are operably linked. In general, expression vectors of utility in recombinant DNA techniques are often in the form of plasmids (vectors). However, the invention is intended to include such other forms of expression vectors, such as viral vectors (e.g., replication defective retroviruses, adenoviruses and adeno-associated viruses), which serve equivalent functions.

[2188] The recombinant expression vectors of the invention comprise a nucleic acid of the invention in a form suitable for expression of the nucleic acid in a host cell. This means that the recombinant expression vectors include one or more regulatory sequences, selected on the basis of the host cells to be used for expression, which is operably linked to the nucleic acid sequence to be expressed. Within a recombinant expression vector, “operably linked” is intended to mean that the nucleotide sequence of interest is linked to the regulatory sequence(s) in a manner which allows for expression of the nucleotide sequence (e.g., in an in vitro transcription/translation system or in a host cell when the vector is introduced into the host cell). The term “regulatory sequence” is intended to include promoters, enhancers and other expression control elements (e.g., polyadenylation signals). Such regulatory sequences are described, for example, in Goeddel, Gene Expression Technology: Methods in Enzymology 185, Academic Press, San Diego, Calif. (1990). Regulatory sequences include those which direct constitutive expression of a nucleotide sequence in many types of host cell and those which direct expression of the nucleotide sequence only in certain host cells (e.g., tissue-specific regulatory sequences). It will be appreciated by those skilled in the art that the design of the expression vector can depend on such factors as the choice of the host cell to be transformed, the level of expression of protein desired, etc. The expression vectors of the invention can be introduced into host cells to thereby produce proteins or peptides, including fusion proteins or peptides, encoded by nucleic acids as described herein.

[2189] The recombinant expression vectors of the invention can be designed for expression of a polypeptide of the invention in prokaryotic (e.g., E. coli) or eukaryotic cells (e.g., insect cells (using baculovirus expression vectors), yeast cells or mammalian cells). Suitable host cells are discussed further in Goeddel, supra. Alternatively, the recombinant expression vector can be transcribed and translated in vitro, for example using T7 promoter regulatory sequences and T7 polymerase.

[2190] Expression of proteins in prokaryotes is most often carried out in E. coli with vectors containing constitutive or inducible promoters directing the expression of either fusion or non-fusion proteins. Fusion vectors add a number of amino acids to a protein encoded therein, usually to the amino terminus of the recombinant protein. Such fusion vectors typically serve three purposes: 1) to increase expression of recombinant protein; 2) to increase the solubility of the recombinant protein; and 3) to aid in the purification of the recombinant protein by acting as a ligand in affinity purification. Often, in fusion expression vectors, a proteolytic cleavage site is introduced at the junction of the fusion moiety and the recombinant protein to enable separation of the recombinant protein from the fusion moiety subsequent to purification of the fusion protein. Such enzymes, and their cognate recognition sequences, include Factor Xa, thrombin and enterokinase. Typical fusion expression vectors include pGEX (Pharmacia Biotech Inc; Smith and Johnson (1988) Gene 67:31-40), pMAL (New England Biolabs, Beverly, Mass.) and pRIT5 (Pharmacia, Piscataway, N.J.) which fuse glutathione S-transferase (GST), maltose E binding protein, or protein A, respectively, to the target recombinant protein.

[2191] Examples of suitable inducible non-fusion E. coli expression vectors include pTrc (Amann et al., (1988) Gene 69:301-315) and pET 11d (Studier et al., Gene Expression Technology: Methods in Enzymology 185, Academic Press, San Diego, Calif. (1990) 60-89). Target gene expression from the pTrc vector relies on host RNA polymerase transcription from a hybrid trp-lac fusion promoter. Target gene expression from the pET 11d vector relies on transcription from a T7 gn10-lac fusion promoter mediated by a coexpressed viral RNA polymerase (T7 gn1). This viral polymerase is supplied by host strains BL21(DE3) or HMS174(DE3) from a resident λ prophage harboring a T7 gn1 gene under the transcriptional control of the lacUV 5 promoter.

[2192] One strategy to maximize recombinant protein expression in E. coli is to express the protein in a host bacteria with an impaired capacity to proteolytically cleave the recombinant protein (Gottesman, Gene Expression Technology: Methods in Enzymology 185, Academic Press, San Diego, Calif. (1990) 119-128). Another strategy is to alter the nucleic acid sequence of the nucleic acid to be inserted into an expression vector so that the individual codons for each amino acid are those preferentially utilized in E. coli (Wada et al. (1992) Nucleic Acids Res. 20:2111-2118). Such alteration of nucleic acid sequences of the invention can be carried out by standard DNA synthesis techniques.

[2193] In another embodiment, the expression vector is a yeast expression vector. Examples of vectors for expression in yeast S. cerivisae include pYepSec1 (Baldari et al. (1987) EMBO J. 6:229-234), pMFa (Kujan and Herskowitz, (1982) Cell 30:933-943), pJRY88 (Schultz et al. (1987) Gene 54:113-123), pYES2 (Invitrogen Corporation, San Diego, Calif.), and pPicZ (Invitrogen Corp, San Diego, Calif.).

[2194] Alternatively, the expression vector is a baculovirus expression vector. Baculovirus vectors available for expression of proteins in cultured insect cells (e.g., Sf 9 cells) include the pAc series (Smith et al. (1983) Mol. Cell Biol. 3:2156-2165) and the pVL series (Lucklow and Summers (1989) Virology 170:31-39).

[2195] In yet another embodiment, a nucleic acid of the invention is expressed in mammalian cells using a mammalian expression vector. Examples of mammalian expression vectors include pCDM8 (Seed (1987) Nature 329:840) and pMT2PC (Kauftnan et al. (1987) EMBO J. 6:187-195). When used in mammalian cells, the expression vector's control functions are often provided by viral regulatory elements. For example, commonly used promoters are derived from polyoma, Adenovirus 2, cytomegalovirus and Simian Virus 40. For other suitable expression systems for both prokaryotic and eukaryotic cells see chapters 16 and 17 of Sambrook et al., supra.

[2196] In another embodiment, the recombinant mammalian expression vector is capable of directing expression of the nucleic acid preferentially in a particular cell type (e.g., tissue-specific regulatory elements are used to express the nucleic acid). Tissue-specific regulatory elements are known in the art. Non-limiting examples of suitable tissue-specific promoters include the albumin promoter (liver-specific; Pinkert et al. (1987) Genes Dev. 1:268-277), lymphoid-specific promoters (Calame and Eaton (1988) Adv. Immunol. 43:235-275), in particular promoters of T cell receptors (Winoto and Baltimore (1989) EMBO J. 8:729-733) and immunoglobulins (Baneiji et al. (1983) Cell 33:729-740; Queen and Baltimore (1983) Cell 33:741-748), neuron-specific promoters (e.g., the neurofilament promoter; Byrne and Ruddle (1989) Proc. Natl. Acad. Sci. USA 86:5473-5477), pancreas-specific promoters (Edlund et al. (1985) Science 230:912-916), and mammary gland-specific promoters (e.g., milk whey promoter; U.S. Pat. No. 4,873,316 and European Application Publication No. 264,166). Developmentally-regulated promoters are also encompassed, for example the murine hox promoters (Kessel and Gruss (1990) Science 249:374-379) and the α-fetoprotein promoter (Campes and Tilghman (1989) Genes Dev. 3:537-546).

[2197] The invention further provides a recombinant expression vector comprising a DNA molecule of the invention cloned into the expression vector in an antisense orientation. That is, the DNA molecule is operably linked to a regulatory sequence in a manner which allows for expression (by transcription of the DNA molecule) of an RNA molecule which is antisense to the mRNA encoding a polypeptide of the invention. Regulatory sequences operably linked to a nucleic acid cloned in the antisense orientation can be chosen which direct the continuous expression of the antisense RNA molecule in a variety of cell types, for instance viral promoters and/or enhancers, or regulatory sequences can be chosen which direct constitutive, tissue specific or cell type specific expression of antisense RNA. The antisense expression vector can be in the form of a recombinant plasmid, phagemid or attenuated virus in which antisense nucleic acids are produced under the control of a high efficiency regulatory region, the activity of which can be determined by the cell type into which the vector is introduced. For a discussion of the regulation of gene expression using antisense genes see Weintraub et al. (Reviews-Trends in Genetics, Vol. 1(1) 1986).

[2198] Another aspect of the invention pertains to host cells into which a recombinant expression vector of the invention has been introduced. The terms “host cell” and “recombinant host cell” are used interchangeably herein. It is understood that such terms refer not only to the particular subject cell but to the progeny or potential progeny of such a cell. Because certain modifications may occur in succeeding generations due to either mutation or environmental influences, such progeny may not, in fact, be identical to the parent cell, but are still included within the scope of the term as used herein.

[2199] A host cell can be any prokaryotic (e.g., E. coli) or eukaryotic cell (e.g., insect cells, yeast or mammalian cells).

[2200] Vector DNA can be introduced into prokaryotic or eukaryotic cells via conventional transformation or transfection techniques. As used herein, the terms “transformation” and “transfection” are intended to refer to a variety of art-recognized techniques for introducing foreign nucleic acid into a host cell, including calcium phosphate or calcium chloride co-precipitation, DEAE-dextran-mediated transfection, lipofection, or electroporation. Suitable methods for transforming or transfecting host cells can be found in Sambrook, et al. (supra), and other laboratory manuals.

[2201] For stable transfection of mammalian cells, it is known that, depending upon the expression vector and transfection technique used, only a small fraction of cells may integrate the foreign DNA into their genome. In order to identify and select these integrants, a gene that encodes a selectable marker (e.g., for resistance to antibiotics) is generally introduced into the host cells along with the gene of interest. Preferred selectable markers include those which confer resistance to drugs, such as G418, hygromycin and methotrexate. Cells stably transfected with the introduced nucleic acid can be identified by drug selection (e.g., cells that have incorporated the selectable marker gene will survive, while the other cells die).

[2202] In another embodiment, the expression characteristics of an endogenous nucleic acid molecule encoding a polypeptide of the invention (e.g., INTERCEPT 258, INTERCEPT 307 and INTERCEPT 340, MANGO 003, MANGO 245, MANGO 346, MANGO 347, MANGO 349, and MANGO 511, and TANGO 128, TANGO 136, TANGO 140, TANGO 176, TANGO 197, TANGO 201, TANGO 204, TANGO 206, TANGO 209, TANGO 212, TANGO 213, TANGO 214, TANGO 216, TANGO 221, TANGO 222, TANGO 223, TANGO 224, TANGO 244, TANGO 246, TANGO 253, TANGO 257, TANGO 261, TANGO 262, TANGO 266, TANGO 267, TANGO 272, TANGO 275, TANGO 295, TANGO 315, TANGO 330, TANGO 339, TANGO 354, TANGO 358, TANGO 361, TANGO 365, TANGO 368, TANGO 369, TANGO 378, TANGO 383, TANGO 437, TANGO 480, and TANGO 499) within a cell, cell line or microorganism may be modified by inserting a DNA regulatory element heterologous to the endogenous gene of interest into the genome of a cell, stable cell line or cloned microorganism such that the inserted regulatory element is operatively linked with the endogenous gene (e.g., INTERCEPT 258, INTERCEPT 307 and INTERCEPT 340, MANGO 003, MANGO 245, MANGO 346, MANGO 347, MANGO 349, and MANGO 511, and TANGO 128, TANGO 136, TANGO 140, TANGO 176, TANGO 197, TANGO 201, TANGO 204, TANGO 206, TANGO 209, TANGO 212, TANGO 213, TANGO 214, TANGO 216, TANGO 221, TANGO 222, TANGO 223, TANGO 224, TANGO 244, TANGO 246, TANGO 253, TANGO 257, TANGO 261, TANGO 262, TANGO 266, TANGO 267, TANGO 272, TANGO 275, TANGO 295, TANGO 315, TANGO 330, TANGO 339, TANGO 354, TANGO 358, TANGO 361, TANGO 365, TANGO 368, TANGO 369, TANGO 378, TANGO 383, TANGO 437, TANGO 480, and TANGO 499) and controls, modulates or activates the endogenous gene. For example, endogenous INTERCEPT 258, INTERCEPT 307 and INTERCEPT 340, MANGO 003, MANGO 245, MANGO 346, MANGO 347, MANGO 349, and MANGO 511, and TANGO 128, TANGO 136, TANGO 140, TANGO 176, TANGO 197, TANGO 201, TANGO 204, TANGO 206, TANGO 209, TANGO 212, TANGO 213, TANGO 214, TANGO 216, TANGO 221, TANGO 222, TANGO 223, TANGO 224, TANGO 244, TANGO 246, TANGO 253, TANGO 257, TANGO 261, TANGO 262, TANGO 266, TANGO 267, TANGO 272, TANGO 275, TANGO 295, TANGO 315, TANGO 330, TANGO 339, TANGO 354, TANGO 358, TANGO 361, TANGO 365, TANGO 368, TANGO 369, TANGO 378, TANGO 383, TANGO 437, TANGO 480, and TANGO 499 which are normally “transcriptionally silent”, i.e., INTERCEPT 258, INTERCEPT 307 and INTERCEPT 340, MANGO 003, MANGO 245, MANGO 346, MANGO 347, MANGO 349, and MANGO 511, and TANGO 128, TANGO 136, TANGO 140, TANGO 176, TANGO 197, TANGO 201, TANGO 204, TANGO 206, TANGO 209, TANGO 212, TANGO 213, TANGO 214, TANGO 216, TANGO 221, TANGO 222, TANGO 223, TANGO 224, TANGO 244, TANGO 246, TANGO 253, TANGO 257, TANGO 261, TANGO 262, TANGO 266, TANGO 267, TANGO 272, TANGO 275, TANGO 295, TANGO 315, TANGO 330, TANGO 339, TANGO 354, TANGO 358, TANGO 361, TANGO 365, TANGO 368, TANGO 369, TANGO 378, TANGO 383, TANGO 437, TANGO 480, and TANGO 499 genes which are normally not expressed, or are expressed only at very low levels in a cell line or microorganism, may be activated by inserting a regulatory element which is capable of promoting the expression of a normally expressed gene product in that cell line or microorganism. Alternatively, transcriptionally silent, endogenous INTERCEPT 258, INTERCEPT 307 and INTERCEPT 340, MANGO 003, MANGO 245, MANGO 346, MANGO 347, MANGO 349, and MANGO 511, and TANGO 128, TANGO 136, TANGO 140, TANGO 176, TANGO 197, TANGO 201, TANGO 204, TANGO 206, TANGO 209, TANGO 212, TANGO 213, TANGO 214, TANGO 216, TANGO 221, TANGO 222, TANGO 223, TANGO 224, TANGO 244, TANGO 246, TANGO 253, TANGO 257, TANGO 261, TANGO 262, TANGO 266, TANGO 267, TANGO 272, TANGO 275, TANGO 295, TANGO 315, TANGO 330, TANGO 339, TANGO 354, TANGO 358, TANGO 361, TANGO 365, TANGO 368, TANGO 369, TANGO 378, TANGO 383, TANGO 437, TANGO 480, and TANGO 499 genes may be activated by insertion of a promiscuous regulatory element that works across cell types.

[2203] A heterologous regulatory element may be inserted into a stable cell line or cloned microorganism, such that it is operatively linked with and activates expression of endogenous INTERCEPT 258, INTERCEPT 307 and INTERCEPT 340, MANGO 003, MANGO 245, MANGO 346, MANGO 347, MANGO 349, and MANGO 511, and TANGO 128, TANGO 136, TANGO 140, TANGO 176, TANGO 197, TANGO 201, TANGO 204, TANGO 206, TANGO 209, TANGO 212, TANGO 213, TANGO 214, TANGO 216, TANGO 221, TANGO 222, TANGO 223, TANGO 224, TANGO 244, TANGO 246, TANGO 253, TANGO 257, TANGO 261, TANGO 262, TANGO 266, TANGO 267, TANGO 272, TANGO 275, TANGO 295, TANGO 315, TANGO 330, TANGO 339, TANGO 354, TANGO 358, TANGO 361, TANGO 365, TANGO 368, TANGO 369, TANGO 378, TANGO 383, TANGO 437, TANGO 480, and TANGO 499 genes, using techniques, such as targeted homologous recombination, which are well known to those of skill in the art, and described e.g., in Chappel, U.S. Pat. No. 5,272,071; PCT publication No. WO 91/06667, published May 16, 1991.

[2204] A host cell of the invention, such as a prokaryotic or eukaryotic host cell in culture, can be used to produce a polypeptide of the invention. Accordingly, the invention further provides methods for producing a polypeptide of the invention using the host cells of the invention. In one embodiment, the method comprises culturing the host cell of invention (into which a recombinant expression vector encoding a polypeptide of the invention has been introduced) in a suitable medium such that the polypeptide is produced. In another embodiment, the method further comprises isolating the polypeptide from the medium or the host cell.

[2205] The host cells of the invention can also be used to produce nonhuman transgenic animals. For example, in one embodiment, a host cell of the invention is a fertilized oocyte or an embryonic stem cell into which a sequence encoding a polypeptide of the invention has been introduced. Such host cells can then be used to create non-human transgenic animals in which exogenous sequences encoding a polypeptide of the invention have been introduced into their genome or homologous recombinant animals in which endogenous encoding a polypeptide of the invention sequences have been altered. Such animals are useful for studying the function and/or activity of the polypeptide and for identifying and/or evaluating modulators of polypeptide activity. In addition to particular gene expression and/or polypeptide expression phenotypes, the transgenic animals of the invention can exhibit any of the phenotypes (e.g., processes, disorder symptoms and/or disorders), as are described in the sections above. As used herein, a “transgenic animal” is a non-human animal, preferably a mammal, more preferably a rodent such as a rat or mouse, in which one or more of the cells of the animal includes a transgene. Other examples of transgenic animals include non-human primates, sheep, dogs, cows, goats, chickens, amphibians, etc. A transgene is exogenous DNA which is integrated into the genome of a cell from which a transgenic animal develops and which remains in the genome of the mature animal, thereby directing the expression of an encoded gene product in one or more cell types or tissues of the transgenic animal. As used herein, an “homologous recombinant animal” is a non-human animal, preferably a mammal, more preferably a mouse, in which an endogenous gene has been altered by homologous recombination between the endogenous gene and an exogenous DNA molecule introduced into a cell of the animal, e.g., an embryonic cell of the animal, prior to development of the animal.

[2206] A transgenic animal of the invention can be created by introducing nucleic acid encoding a polypeptide of the invention (or a homologue thereof) into the male pronuclei of a fertilized oocyte, e.g., by microinjection, retroviral infection, and allowing the oocyte to develop in a pseudopregnant female foster animal. Intronic sequences and polyadenylation signals can also be included in the transgene to increase the efficiency of expression of the transgene. A tissue-specific regulatory sequence(s) can be operably linked to the transgene to direct expression of the polypeptide of the invention to particular cells. Methods for generating transgenic animals via embryo manipulation and microinjection, particularly animals such as mice, have become conventional in the art and are described, for example, in U.S. Pat. Nos. 4,736,866, 4,870,009, 4,873,191 and in Hogan, Manipulating the Mouse Embryo, (Cold Spring Harbor Laboratory Press, Cold Spring Harbor, N.Y., 1986) and Wakayama et al, (1999), Proc. Natl. Acad. Sci. USA, 96:14984-14989. Similar methods are used for production of other transgenic animals. A transgenic founder animal can be identified based upon the presence of the transgene in its genome and/or expression of mRNA encoding the transgene in tissues or cells of the animals. A transgenic founder animal can then be used to breed additional animals carrying the transgene. Moreover, transgenic animals carrying the transgene can further be bred to other transgenic animals carrying other transgenes.

[2207] To create an homologous recombinant animal, a vector is prepared which contains at least a portion of a gene encoding a polypeptide of the invention into which a deletion, addition or substitution has been introduced to thereby alter, e.g., functionally disrupt, the gene. In a preferred embodiment, the vector is designed such that, upon homologous recombination, the endogenous gene is functionally disrupted (i.e., no longer encodes a functional protein; also referred to as a “knock out” vector). Alternatively, the vector can be designed such that, upon homologous recombination, the endogenous gene is mutated or otherwise altered but still encodes functional protein (e.g., the upstream regulatory region can be altered to thereby alter the expression of the endogenous protein). In the homologous recombination vector, the altered portion of the gene is flanked at its 5′ and 3′ ends by additional nucleic acid of the gene to allow for homologous recombination to occur between the exogenous gene carried by the vector and an endogenous gene in an embryonic stem cell. The additional flanking nucleic acid sequences are of sufficient length for successful homologous recombination with the endogenous gene. Typically, several kilobases of flanking DNA (both at the 5′ and 3′ ends) are included in the vector (see, e.g., Thomas and Capecchi (1987) Cell 51:503 for a description of homologous recombination vectors). The vector is introduced into an embryonic stem cell line (e.g., by electroporation) and cells in 5which the introduced gene has homologously recombined with the endogenous gene are selected (see, e.g., li et al. (1992) Cell 69:915). The selected cells are then injected into a blastocyst of an animal (e.g., a mouse) to form aggregation chimeras (see, e.g. Bradley in Teratocarcinomas and Embryonic Stem Cells: A Practical Approach, Robertson, ed. (IRL, Oxford, 1987) pp. 113-152). A chimeric embryo can then be implanted into a suitable pseudopregnant female foster animal and the embryo brought to term. Progeny harboring the homologously recombined DNA in their germ cells can be used to breed animals in which all cells of the animal contain the homologously recombined DNA by germline transmission of the transgene. Methods for constructing homologous recombination vectors and homologous recombinant animals are described further in Bradley (1991) Current Opinion in Bio/Technology 2:823-829 and in PCT Publication Nos. WO 90/11354, WO 91/01140, WO 92/0968, and WO 93/04169.

[2208] In another embodiment, transgenic non-human animals can be produced which contain selected systems which allow for regulated expression of the transgene. One example of such a system is the cre/loxP recombinase system of bacteriophage P1. For a description of the cre/loxP recombinase system, see, e.g. Lakso et al. (1992) Proc. Natl. Acad. Sci. USA 89:6232-6236. Another example of a recombinase system is the FLP recombinase system of Saccharomyces cerevisiae (O'Gorman et al. (1991) Science 251:1351-1355. If a cre/loxP recombinase system is used to regulate expression of the transgene, animals containing transgenes encoding both the Cre recombinase and a selected protein are required. Such animals can be provided through the construction of “double” transgenic animals, e.g., by mating two transgenic animals, one containing a transgene encoding a selected protein and the other containing a transgene encoding a recombinase.

[2209] Clones of the non-human transgenic animals described herein can also be produced according to the methods described in Wilmut et al. (1997) Nature 385:810-813 and PCT Publication NOS. WO 97/07668 and WO 97/07669.

[2210] IV. Pharmaceutical Compositions

[2211] The nucleic acid molecules, polypeptides, and antibodies (also referred to herein as “active compounds”) of the invention can be incorporated into pharmaceutical compositions suitable for administration. Such compositions typically comprise the nucleic acid molecule, protein, or antibody and a pharmaceutically acceptable carrier. As used herein the language “pharmaceutically acceptable carrier” is intended to include any and all solvents, dispersion media, coatings, antibacterial and antifungal agents, isotonic and absorption delaying agents, and the like, compatible with pharmaceutical administration. The use of such media and agents for pharmaceutically active substances is well known in the art. Except insofar as any conventional media or agent is incompatible with the active compound, use thereof in the compositions is contemplated. Supplementary active compounds can also be incorporated into the compositions.

[2212] The invention includes methods for preparing pharmaceutical compositions for modulating the expression or activity of a polypeptide or nucleic acid of the invention. Such methods comprise formulating a pharmaceutically acceptable carrier with an agent which modulates expression or activity of a polypeptide or nucleic acid of the invention. Such compositions can further include additional active agents. Thus, the invention further includes methods for preparing a pharmaceutical composition by formulating a pharmaceutically acceptable carrier with an agent which modulates expression or activity of a polypeptide or nucleic acid of the invention and one or more additional active compounds.

[2213] A pharmaceutical composition of the invention is formulated to be compatible with its intended route of administration. Examples of routes of administration include parenteral, e.g., intravenous, intradermal, subcutaneous, oral (e.g., inhalation), transdermal (topical), transmucosal, and rectal administration. Solutions or suspensions used for parenteral, intradermal, or subcutaneous application can include the following components: a sterile diluent such as water for injection, saline solution, fixed oils, polyethylene glycols, glycerine, propylene glycol or other synthetic solvents; antibacterial agents such as benzyl alcohol or methyl parabens; antioxidants such as ascorbic acid or sodium bisulfite; chelating agents such as ethylenediaminetetraacetic acid; buffers such as acetates, citrates or phosphates and agents for the adjustment of tonicity such as sodium chloride or dextrose. pH can be adjusted with acids or bases, such as hydrochloric acid or sodium hydroxide. The parenteral preparation can be enclosed in ampoules, disposable syringes or multiple dose vials made of glass or plastic.

[2214] Pharmaceutical compositions suitable for injectable use include sterile aqueous solutions (where water soluble) or dispersions and sterile powders for the extemporaneous preparation of sterile injectable solutions or dispersions. For intravenous administration, suitable carriers include physiological saline, bacteriostatic water, Cremophor EL™ (BASF; Parsippany, N.J.) or phosphate buffered saline (PBS). In all cases, the composition must be sterile and should be fluid to the extent that easy syringability exists. It must be stable under the conditions of manufacture and storage and must be preserved against the contaminating action of microorganisms such as bacteria and fungi. The carrier can be a solvent or dispersion medium containing, for example, water, ethanol, polyol (for example, glycerol, propylene glycol, and liquid polyetheylene glycol, and the like), and suitable mixtures thereof The proper fluidity can be maintained, for example, by the use of a coating such as lecithin, by the maintenance of the required particle size in the case of dispersion and by the use of surfactants. Prevention of the action of microorganisms can be achieved by various antibacterial and antifungal agents, for example, parabens, chlorobutanol, phenol, ascorbic acid, thimerosal, and the like. In many cases, it will be preferable to include isotonic agents, for example, sugars, polyalcohols such as mannitol, sorbitol, sodium chloride in the composition. Prolonged absorption of the injectable compositions can be brought about by including in the composition an agent which delays absorption, for example, aluminum monostearate and gelatin.

[2215] Sterile injectable solutions can be prepared by incorporating the active compound (e.g., a polypeptide or antibody) in the required amount in an appropriate solvent with one or a combination of ingredients enumerated above, as required, followed by filtered sterilization. Generally, dispersions are prepared by incorporating the active compound into a sterile vehicle which contains a basic dispersion medium and the required other ingredients from those enumerated above. In the case of sterile powders for the preparation of sterile injectable solutions, the preferred methods of preparation are vacuum drying and freeze-drying which yields a powder of the active ingredient plus any additional desired ingredient from a previously sterile-filtered solution thereof.

[2216] Oral compositions generally include an inert diluent or an edible carrier. They can be enclosed in gelatin capsules or compressed into tablets. For the purpose of oral therapeutic administration, the active compound can be incorporated with excipients and used in the form of tablets, troches, or capsules. Oral compositions can also be prepared using a fluid carrier for use as a mouthwash, wherein the compound in the fluid carrier is applied orally and swished and expectorated or swallowed.

[2217] Pharmaceutically compatible binding agents, and/or adjuvant materials can be included as part of the composition. The tablets, pills, capsules, troches and the like can contain any of the following ingredients, or compounds of a similar nature: a binder such as microcrystalline cellulose, gum tragacanth or gelatin; an excipient such as starch or lactose, a disintegrating agent such as alginic acid, Primogel, or corn starch; a lubricant such as magnesium stearate or Sterotes; a glidant such as colloidal silicon dioxide; a sweetening agent such as sucrose or saccharin; or a flavoring agent such as peppermint, methyl salicylate, or orange flavoring.

[2218] For administration by inhalation, the compounds are delivered in the form of an aerosol spray from a pressurized container or dispenser which contains a suitable propellant, e.g., a gas such as carbon dioxide, or a nebulizer.

[2219] Systemic administration can also be by transmucosal or transdermal means. For transmucosal or transdermal administration, penetrants appropriate to the barrier to be permeated are used in the formulation. Such penetrants are generally known in the art, and include, for example, for transmucosal administration, detergents, bile salts, and fusidic acid derivatives. Transmucosal administration can be accomplished through the use of nasal sprays or suppositories. For transdermal administration, the active compounds are formulated into ointments, salves, gels, or creams as generally known in the art.

[2220] The compounds can also be prepared in the form of suppositories (e.g., with conventional suppository bases such as cocoa butter and other glycerides) or retention enemas for rectal delivery.

[2221] In one embodiment, the active compounds are prepared with carriers that will protect the compound against rapid elimination from the body, such as a controlled release formulation, including implants and microencapsulated delivery systems. Biodegradable, biocompatible polymers can be used, such as ethylene vinyl acetate, polyanhydrides, polyglycolic acid, collagen, polyorthoesters, and polylactic acid. Methods for preparation of such formulations will be apparent to those skilled in the art. The materials can also be obtained commercially from Alza Corporation and Nova Pharmaceuticals, Inc. Liposomal suspensions (including liposomes targeted to infected cells with monoclonal antibodies to viral antigens) can also be used as pharmaceutically acceptable carriers. These can be prepared according to methods known to those skilled in the art, for example, as described in U.S. Pat. No. 4,522,811.

[2222] It is especially advantageous to formulate oral or parenteral compositions in dosage unit form for ease of administration and uniformity of dosage. Dosage unit form as used herein refers to physically discrete units suited as unitary dosages for the subject to be treated; each unit containing a predetermined quantity of active compound calculated to produce the desired therapeutic effect in association with the required pharmaceutical carrier. The specification for the dosage unit forms of the invention are dictated by and directly dependent on the unique characteristics of the active compound and the particular therapeutic effect to be achieved, and the limitations inherent in the art of compounding such an active compound for the treatment of individuals.

[2223] For antibodies, the preferred dosage is 0.1 mg/kg to 100 mg/kg of body weight (generally 10 mg/kg to 20 mg/kg). If the antibody is to act in the brain, a dosage of 50 mg/kg to 100 mg/kg is usually appropriate. Generally, partially human antibodies and fully human antibodies have a longer half-life within the human body than other antibodies. Accordingly, lower dosages and less frequent administration is often possible. Modifications such as lipidation can be used to stabilize antibodies and to enhance uptake and tissue penetration (e.g., into the brain). A method for lipidation of antibodies is described by Cruikshank et al. ((1997) J. Acquired Immune Deficiency Syndromes and Human Retrovirology 14:193).

[2224] Antibodies or antibodies conjugated to therapeutic moieties can be administered to an individual alone or in combination with cytotoxic factor(s), chemotherapeutic drug(s), and/or cytokine(s). If the latter, preferably, the antibodies are administered first and the cytotoxic factor(s), chemotherapeutic drug(s) and/or cytokine(s) are administered thereafter within 24 hours. The antibodies and cytotoxic factor(s), chemotherapeutic drug(s) and/or cytokine(s) can be administered by multiple cycles depending upon the clinical response of the patient. Further, the antibodies and cytotoxic factor(s), chemotherapeutic drug(s) and/or cytokine(s) can be administered by the same or separate routes, for example, by intravenous, intranasal or intramuscular administration. Cytotoxic factors include, but are not limited to, TNF-α, TNF-β, IL-1, IFN-γ and IL-2. Chemotherapeutic drugs include, but are not limited to, 5-fluorouracil (5FU), vinblastine, actinomycin D, etoposide, cisplatin, methotrexate and doxorubicin. Cytokines include, but are not limited to, IL-2, IL-3, IL-4, IL-5, IL-6, IL-7, IL-8, IL-9, IL-10, IL-12 and IL-15.

[2225] As defined herein, a therapeutically effective amount of protein or polypeptide (i.e., an effective dosage) ranges from about 0.001 to 30 mg/kg body weight, preferably about 0.01 to 25 mg/kg body weight, more preferably about 0.1 to 20 mg/kg body weight, and even more preferably about 1 to 10 mg/kg, 2 to 9 mg/kg, 3 to 8 mg/kg, 4 to 7 mg/kg, or 5 to 6 mg/kg body weight.

[2226] The skilled artisan will appreciate that certain factors may influence the dosage required to effectively treat a subject, including but not limited to the severity of the disease or disorder, previous treatments, the general health and/or age of the subject, and other diseases present. Moreover, treatment of a subject with a therapeutically effective amount of a protein, polypeptide, or antibody can include a single treatment or, preferably, can include a series of treatments. In a preferred example, a subject is treated with antibody, protein, or polypeptide in the range of between about 0.1 to 20 mg/kg body weight, one time per week for between about 1 to 10 weeks, preferably between 2 to 8 weeks, more preferably between about 3 to 7 weeks, and even more preferably for about 4, 5, or 6 weeks. It will also be appreciated that the effective dosage of antibody, protein, or polypeptide used for treatment may increase or decrease over the course of a particular treatment. Changes in dosage may result and become apparent from the results of diagnostic assays as described herein.

[2227] The present invention encompasses agents which modulate expression or activity. An agent may, for example, be a small molecule. For example, such small molecules include, but are not limited to, peptides, peptidomimetics, amino acids, amino acid analogs, polynucleotides, polynucleotide analogs, nucleotides, nucleotide analogs, organic or inorganic compounds (i.e., including heteroorganic and organometallic compounds) having a molecular weight less than about 10,000 grams per mole, organic or inorganic compounds having a molecular weight less than about 5,000 grams per mole, organic or inorganic compounds having a molecular weight less than about 1,000 grams per mole, organic or inorganic compounds having a molecular weight less than about 500 grams per mole, and salts, esters, and other pharmaceutically acceptable forms of such compounds.

[2228] It is understood that appropriate doses of small molecule agents depends upon a number of factors within the ken of the ordinarily skilled physician, veterinarian, or researcher. The dose(s) of the small molecule will vary, for example, depending upon the identity, size, and condition of the subject or sample being treated, further depending upon the route by which the composition is to be administered, if applicable, and the effect which the practitioner desires the small molecule to have upon the nucleic acid or polypeptide of the invention. Exemplary doses include milligram or microgram amounts of the small molecule per kilogram of subject or sample weight (e.g., about 1 microgram per kilogram to about 500 milligrams per kilogram, about 100 micrograms per kilogramt to about 5 milligrams per kilogram, or about 1 microgram per kilogram to about 50 micrograms per kilogram. It is furthermore understood that appropriate doses of a small molecule depend upon the potency of the small molecule with respect to the expression or activity to be modulated. Such appropriate doses may be determined using the assays described herein. When one or more of these small molecules is to be administered to an animal (e.g. a human) in order to modulate expression or activity of a polypeptide or nucleic acid of the invention, a physician, veterinarian, or researcher may, for example, prescribe a relatively low dose at first, subsequently increasing the dose until an appropriate response is obtained. In addition, it is understood that the specific dose level for any particular animal subject will depend upon a variety of factors including the activity of the specific compound employed, the age, body weight, general health, gender, and diet of the subject, the time of administration, the route of administration, the rate of excretion, any drug combination, and the degree of expression or activity to be modulated.

[2229] The nucleic acid molecules of the invention can be inserted into vectors and used as gene therapy vectors. Gene therapy vectors can be delivered to a subject by, for example, intravenous injection, local administration (U.S. Pat. No. 5,328,470) or by stereotactic injection (see, e.g., Chen et al. (1994) Proc. Natl. Acad. Sci. USA 91:3054-3057). The pharmaceutical preparation of the gene therapy vector can include the gene therapy vector in an acceptable diluent, or can comprise a slow release matrix in which the gene delivery vehicle is imbedded. Alternatively, where the complete gene delivery vector can be produced intact from recombinant cells, e.g., retroviral vectors, the pharmaceutical preparation can include one or more cells which produce the gene delivery system.

[2230] The pharmaceutical compositions can be included in a container, pack, or dispenser together with instructions for administration.

[2231] V. Uses and Methods of the Invention

[2232] The nucleic acid molecules, proteins, protein homologs, and antibodies described herein can be used in one or more of the following methods: a) screening assays; b) detection assays (e.g., chromosomal mapping, tissue typing, forensic biology); c) predictive medicine (e.g., diagnostic assays, prognostic assays, monitoring clinical trials, and pharmacogenomics); and d) methods of treatment (e.g., therapeutic and prophylactic). For example, polypeptides of the invention can to used to (i) modulate cellular proliferation; (ii) modulate cellular differentiation; and/or (iii) modulate cellular adhesion. The isolated nucleic acid molecules of the invention can be used to express proteins (e.g., via a recombinant expression vector in a host cell in gene therapy applications), to detect mRNA (e.g., in a biological sample) or a genetic lesion, and to modulate activity of a polypeptide of the invention. In addition, the polypeptides of the invention can be used to screen drugs or compounds which modulate activity or expression of a polypeptide of the invention as well as to treat disorders characterized by insufficient or excessive production of a protein of the invention or production of a form of a protein of the invention which has decreased or aberrant activity compared to the wild type protein. In addition, the antibodies of the invention can be used to detect and isolate a protein of the and modulate activity of a protein of the invention.

[2233] This invention further pertains to novel agents identified by the above-described screening assays and uses thereof for treatments as described herein.

[2234] A. Screening Assays

[2235] The invention provides a method (also referred to herein as a “screening assay”) for identifying modulators, ie., candidate or test compounds or agents (e.g., peptides, peptidomimetics, small molecules or other drugs) which bind to polypeptide of the invention or have a stimulatory or inhibitory effect on, for example, expression or activity of a polypeptide of the invention.

[2236] In one embodiment, the invention provides assays for screening candidate or test compounds which bind to or modulate the activity of the membrane-bound form of a polypeptide of the invention or biologically active portion thereof. The test compounds of the present invention can be obtained using any of the numerous approaches in combinatorial library methods known in the art, including: biological libraries; spatially addressable parallel solid phase or solution phase libraries; synthetic library methods requiring deconvolution; the “one-bead one-compound” library method; and synthetic library methods using affinity chromatography selection. The biological library approach is limited to peptide libraries, while the other four approaches are applicable to peptide, non-peptide oligomer or small molecule libraries of compounds (Lam (1997) Anticancer Drug Des. 12:145).

[2237] Examples of methods for the synthesis of molecular libraries can be found in the art, for example in: DeWitt et al. (1993) Proc. Natl. Acad. Sci. USA 90:6909; Erb et al. (1994) Proc. Natl. Acad. Sci. USA 91:11422; Zuckermann et al. (1994). J. Med. Chem. 37:2678; Cho et al. (1993) Science 261:1303; Carrell et al. (1994) Angew. Chem. Int. Ed. Engl. 33:2059; Carell et al. (1994) Angew. Chem. Int. Ed. Engl. 33:2061; and Gallop et al. (1994) J. Med. Chem. 37:1233.

[2238] Libraries of compounds may be presented in solution (e.g., Houghten (1992) BiolTechniques 13:412-421), or on beads (Lam (1991) Nature 354:82-84), chips (Fodor (1993) Nature 364:555-556), bacteria (U.S. Pat. No. 5,223,409), spores (Pat. Nos. 5,571,698; 5,403,484; and 5,223,409), plasmids (Cull et al. (1992) Proc. Natl. Acad. Sci. USA 89:1865-1869) or phage (Scott and Smith (1990) Science 249:386-390; Devlin (1990) Science 249:404-406; Cwirla et al. (1990) Proc. Natl. Acad. Sci. USA 87:6378-6382; and Felici (1991) J. Mol. Biol. 222:301-310).

[2239] In one embodiment, an assay is a cell-based assay in which a cell which expresses a membrane-bound form of a polypeptide of the invention, or a biologically active portion thereof, on the cell surface is contacted with a test compound and the ability of the test compound to bind to the polypeptide determined. The cell, for example, can be a yeast cell or a cell of mammalian origin. Determining the ability of the test compound to bind to the polypeptide can be accomplished, for example, by coupling the test compound with a radioisotope or enzymatic label such that binding of the test compound to the polypeptide or biologically active portion thereof can be determined by detecting the labeled compound in a complex. For example, test compounds can be labeled with ¹²⁵I, ³⁵S, ¹⁴C, or ³H, either directly or indirectly, and the radioisotope detected by direct counting of radioemmission or by scintillation counting. Alternatively, test compounds can be enzymatically labeled with, for example, horseradish peroxidase, alkaline phosphatase, or luciferase, and the enzymatic label detected by determination of conversion of an appropriate substrate to product. In a preferred embodiment, the assay comprises contacting a cell which expresses a membrane-bound form of a polypeptide of the invention, or a biologically active portion thereof, on the cell surface with a known compound which binds the polypeptide to form an assay mixture, contacting the assay mixture with a test compound, and determining the ability of the test compound to interact with the polypeptide, wherein determining the ability of the test compound to interact with the polypeptide comprises determining the ability of the test compound to preferentially bind to the polypeptide or a biologically active portion thereof as compared to the known compound.

[2240] In another embodiment, an assay is a cell-based assay comprising contacting a cell expressing a membrane-bound form of a polypeptide of the invention, or a biologically active portion thereof, on the cell surface with a test compound and determining the ability of the test compound to modulate (e.g., stimulate or inhibit) the activity of the polypeptide or biologically active portion thereof. Determining the ability of the test compound to modulate the activity of the polypeptide or a biologically active portion thereof can be accomplished, for example, by determining the ability of the polypeptide protein to bind to or interact with a target molecule.

[2241] Determining the ability of a polypeptide of the invention to bind to or interact with a target molecule can be accomplished by one of the methods described above for determining direct binding. As used herein, a “target molecule” is a molecule with which a selected polypeptide (e.g., a polypeptide of the invention) binds or interacts with in nature, for example, a molecule on the surface of a cell which expresses the selected protein, a molecule on the surface of a second cell, a molecule in the extracellular milieu, a molecule associated with the internal surface of a cell membrane or a cytoplasmic molecule. A target molecule can be a polypeptide of the invention or some other polypeptide or protein. For example, a target molecule can be a component of a signal transduction pathway which facilitates transduction of an extracellular signal (e.g., a signal generated by binding of a compound to a polypeptide of the invention) through the cell membrane and into the cell or a second intercellular protein which has catalytic activity or a protein which facilitates the association of downstream signaling molecules with a polypeptide of the invention. Determining the ability of a polypeptide of the invention to bind to or interact with a target molecule can be accomplished by determining the activity of the target molecule. For example, the activity of the target molecule can be determined by detecting induction of a cellular second messenger of the target (e.g., intracellular Ca²+, diacylglycerol, IP3, etc.), detecting catalytic/enzymatic activity of the target on an appropriate substrate, detecting the induction of a reporter gene (e.g., a regulatory element that is responsive to a polypeptide of the invention operably linked to a nucleic acid encoding a detectable marker, e.g., luciferase), or detecting a cellular response, for example, cellular differentiation, or cell proliferation.

[2242] In yet another embodiment, an assay of the present invention is a cell-free assay comprising contacting a polypeptide of the invention or biologically active portion thereof with a test compound and determining the ability of the test compound to bind to the polypeptide or biologically active portion thereof. Binding of the test compound to the polypeptide can be determined either directly or indirectly as described above. In a preferred embodiment, the assay includes contacting the polypeptide of the invention or biologically active portion thereof with a known compound which binds the polypeptide to form an assay mixture, contacting the assay mixture with a test compound, and determining the ability of the test compound to interact with the polypeptide, wherein determining the ability of the test compound to interact with the polypeptide comprises determining the ability of the test compound to preferentially bind to the polypeptide or biologically active portion thereof as compared to the known compound.

[2243] In another embodiment, an assay is a cell-free assay comprising contacting a polypeptide of the invention or biologically active portion thereof with a test compound and determining the ability of the test compound to modulate (e.g., stimulate or inhibit) the activity of the polypeptide or biologically active portion thereof. Determining the ability of the test compound to modulate the activity of the polypeptide can be accomplished, for example, by determining the ability of the polypeptide to bind to a target molecule by one of the methods described above for determining direct binding. In an alternative embodiment, determining the ability of the test compound to modulate the activity of the polypeptide can be accomplished by determining the ability of the polypeptide of the invention to further modulate the target molecule. For example, the catalytic/enzymatic activity of the target molecule on an appropriate substrate can be determined as previously described.

[2244] In yet another embodiment, the cell-free assay comprises contacting a polypeptide of the invention or biologically active portion thereof with a known compound which binds the polypeptide to form an assay mixture, contacting the assay mixture with a test compound, and determining the ability of the test compound to interact with the polypeptide, wherein determining the ability of the test compound to interact with the polypeptide comprises determining the ability of the polypeptide to preferentially bind to or modulate the activity of a target molecule.

[2245] The cell-free assays of the present invention are amenable to use of both a soluble form or the membrane-bound form of a polypeptide of the invention. In the case of cell-free assays comprising the membrane-bound form of the polypeptide, it may be desirable to utilize a solubilizing agent such that the membrane-bound form of the polypeptide is maintained in solution. Examples of such solubilizing agents include non-ionic detergents such as n-octylglucoside, n-dodecylglucoside, n-octylmaltoside, octanoyl-N-methylglucamide, decanoyl-N-methylglucamide, Triton X-100, Triton X-114, Thesit, Isotridecypoly(ethylene glycol ether)n, 3-[(3-cholamidopropyl)dimethylamminio]-1-propane sulfonate (CHAPS), 3-[(3-cholamidopropyl)dimethylamminio]-2-hydroxy-1-propane sulfonate (CHAPSO), or N-dodecyl=N,N-dimethyl-3-ammonio-1-propane sulfonate.

[2246] In more than one embodiment of the above assay methods of the present invention, it may be desirable to immobilize either the polypeptide of the invention or its target molecule to facilitate separation of complexed from uncomplexed forms of one or both of the proteins, as well as to accommodate automation of the assay. Binding of a test compound to the polypeptide, or interaction of the polypeptide with a target molecule in the presence and absence of a candidate compound, can be accomplished in any vessel suitable for containing the reactants. Examples of such vessels include microtitre plates, test tubes, and micro-centrifuge tubes. In one embodiment, a fusion protein can be provided which adds a domain that allows one or both of the proteins to be bound to a matrix. For example, glutathione-S-transferase fusion proteins or glutathione-S-transferase fusion proteins can be adsorbed onto glutathione sepharose beads (Sigma Chemical; St. Louis, Mo.) or glutathione derivatized microtitre plates, which are then combined with the test compound or the test compound and either the non-adsorbed target protein or A polypeptide of the invention, and the mixture incubated under conditions conducive to complex formation (e.g., at physiological conditions for salt and pH). Following incubation, the beads or microtitre plate wells are washed to remove any unbound components and complex formation is measured either directly or indirectly, for example, as described above. Alternatively, the complexes can be dissociated from the matrix, and the level of binding or activity of the polypeptide of the invention can be determined using standard techniques.

[2247] Other techniques for immobilizing proteins on matrices can also be used in the screening assays of the invention. For example, either the polypeptide of the invention or its target molecule can be immobilized utilizing conjugation of biotin and streptavidin. Biotinylated polypeptide of the invention or target molecules can be prepared from biotin-NHS (N-hydroxy-succinimide) using techniques well known in the art (e.g., biotinylation kit, Pierce Chemicals; Rockford, Ill.), and immobilized in the wells of streptavidin-coated 96 well plates (Pierce Chemical). Alternatively, antibodies reactive with the polypeptide of the invention or target molecules but which do not interfere with binding of the polypeptide of the invention to its target molecule can be derivatized to the wells of the plate, and unbound target or polypeptide of the invention trapped in the wells by antibody conjugation. Methods for detecting such complexes, in addition to those described above for the GST-immobilized complexes, include immunodetection of complexes using antibodies reactive with the polypeptide of the invention or target molecule, as well as enzyme-linked assays which rely on detecting an enzymatic activity associated with the polypeptide of the invention or target molecule.

[2248] In another embodiment, modulators of expression of a polypeptide of the invention are identified in a method in which a cell is contacted with a candidate compound and the expression of the selected mRNA or protein (i.e., the mRNA or protein corresponding to a polypeptide or nucleic acid of the invention) in the cell is determined. The level of expression of the selected mRNA or protein in the presence of the candidate compound is a compared to the level of expression of the selected mRNA or protein in the absence of the candidate compound. The candidate compound can then be identified as a modulator of expression of the polypeptide of the invention based on this comparison. For example, when expression of the selected mRNA or protein is greater (statistically significantly greater) in the presence of the candidate compound than in its absence, the candidate compound is identified as a stimulator of the selected mRNA or protein expression. Alternatively, when expression of the selected MnRNA or protein is less (statistically significantly less) in the presence of the candidate compound than in its absence, the candidate compound is identified as an inhibitor of the selected mRNA or protein expression. The level of the selected mRNA or protein expression in the cells can be determined by methods described herein.

[2249] In yet another aspect of the invention, a polypeptide of the inventions can be used as “bait proteins” in a two-hybrid assay or three hybrid assay (see, e.g., U.S. Pat. No. 5,283,317; Zervos et al. (1993) Cell 72:223-232; Madura et al. (1993) J. Biol Chem. 268:12046-12054; Bartel et al. (1993) Bio/Techniques 14:920-924; Iwabuchi et al. (1993) Oncogene 8:1693-1696; and PCT Publication No. WO 94/10300), to identify other proteins, which bind to or interact with the polypeptide of the invention and modulate activity of the polypeptide of the invention. Such binding proteins are also likely to be involved in the propagation of signals by the polypeptide of the inventions as, for example, upstream or downstream elements of a signaling pathway involving the polypeptide of the invention.

[2250] This invention further pertains to novel agents identified by the above-described screening assays and uses thereof for treatments as described herein.

[2251] B. Detection Assays

[2252] Portions or fragments of the cDNA sequences identified herein (and the corresponding complete gene sequences) can be used in numerous ways as polynucleotide reagents. For example, these sequences can be used to: (i) map their respective genes on a chromosome and, thus, locate gene regions associated with genetic disease; (ii) identify an individual from a minute biological sample (tissue typing); and (iii) aid in forensic identification of a biological sample. These applications are described in the subsections below.

[2253] 1. Chromosome Mapping

[2254] Once the sequence (or a portion of the sequence) of a gene has been isolated, this sequence can be used to map the location of the gene on a chromosome. Accordingly, nucleic acid molecules described herein or fragments thereof, can be used to map the location of the corresponding genes on a chromosome. The mapping of the sequences to chromosomes is an important first step in correlating these sequences with genes associated with disease.

[2255] For example, TANGO 128 has been mapped to chromosome 4, between flanking markers WI-3936 and AFMCO27ZB9; TANGO 213 has been mapped to chromosome 17, in the region p13.3, between flanking markers WI-5436 and WI-6584; human TANGO 201 maps to human chromosome 2 between markers D2S123 and D2S378; human TANGO 223 maps to human chromosome 15q26 between flanking markers WI-3162 and WI-4919; human TANGO 216 has been mapped to the long arm of chromosome 4, in the region q11-13, between flanking markers GCT14E02 and jktbp-rs2; human TANGO 261 has been mapped to the long arm of chromosome 20, in the region q13.2-13.3, between flanking markers WI-3773 and AFMA202YB9; human TANGO 262 has been mapped to the long arm of chromosome 14, in the region q23-q24, between flanking markers WI-6253 and WI-5815; human TANGO 267 was mapped to the long arm of chromosome X, in the region q12, between flanking markers WI-5587 and WI-5717; human TANGO 204 has been mapped to the long arm of chromosome 8q, in the region, between flanking markers D1Mit430 and D1Mit119; human TANGO 209 has been mapped to the long arm of chromosome 6, in the region q26-27, between flanking markers ATA22G07 and WI-9405; TANGO 339 has been mapped to chromosome 10; INTERCEPT 307 has been mapped to chromosome 11, between markers D11S1357 and D11S1765; human MANGO 511 was mapped (by BLASTing to MAPEST database) to human chromosome 11 between D11S1357 and D11S1765 (62.5-65 cM); and human TANGO 330, form 1 was mapped (by BLASTing to MAPEST database) to human chrmosome 11 between D11S1328 and D11S934 (128.4-131.7 cM).

[2256] Briefly, genes can be mapped to chromosomes by preparing PCR primers (preferably 15-25 bp in length) from the sequence of a gene of the invention. Computer analysis of the sequence of a gene of the invention can be used to rapidly select primers that do not span more than one exon in the genomic DNA, thus complicating the amplification process. These primers can then be used for PCR screening of somatic cell hybrids containing individual human chromosomes. Only those hybrids containing the human gene corresponding to the gene sequences will yield an amplified fragment. For a review of this technique, see D'Eustachio et al. ((1983) Science 220:919-924).

[2257] PCR mapping of somatic cell hybrids is a rapid procedure for assigning a particular sequence to a particular chromosome. Three or more sequences can be assigned per day using a single thermal cycler. Using the nucleic acid sequences of the invention to design oligonucleotide primers, sublocalization can be achieved with panels of fragments from specific chromosomes. Other mapping strategies which can similarly be used to map a gene to its chromosome include in situ hybridization (described in Fan et al. (1990) Proc. Natl. Acad. Sci. USA 87:6223-27), pre-screening with labeled flow-sorted chromosomes (CITE), and pre-selection by hybridization to chromosome specific cDNA libraries. Fluorescence in situ hybridization (FISH) of a DNA sequence to a metaphase chromosomal spread can further be used to provide a precise chromosomal location in one step. For a review of this technique, see Verma et al., (Human Chromosomes: A Manual of Basic Techniques (Pergamon Press, New York, 1988)).

[2258] Reagents for chromosome mapping can be used individually to mark a single chromosome or a single site on that chromosome, or panels of reagents can be used for marking multiple sites and/or multiple chromosomes. Reagents corresponding to noncoding regions of the genes actually are preferred for mapping purposes. Coding sequences are more likely to be conserved within gene families, thus increasing the chance of cross hybridizations during chromosomal mapping.

[2259] Once a sequence has been mapped to a precise chromosomal location, the physical position of the sequence on the chromosome can be correlated with genetic map data. (Such data are found, for example, in V. McKusick, Mendelian Inheritance in Man, available on-line through Johns Hopkins University Welch Medical Library). The relationship between genes and disease, mapped to the same chromosomal region, can then be identified through linkage analysis (co-inheritance of physically adjacent genes), described in, e.g., Egeland et al. (1987) Nature 325:783-787.

[2260] Moreover, differences in the DNA sequences between individuals affected and unaffected with a disease associated with a gene of the invention can be determined. If a mutation is observed in some or all of the affected individuals but not in any unaffected individuals, then the mutation is likely to be the causative agent of the particular disease. Comparison of affected and unaffected individuals generally involves first looking for structural alterations in the chromosomes such as deletions or translocations that are visible from chromosome spreads or detectable using PCR based on that DNA sequence. Ultimately, complete sequencing of genes from several individuals can be performed to confirm the presence of a mutation and to distinguish mutations from polymorphisms.

[2261] Furthermore, the nucleic acid sequences disclosed herein can be used to perform searches against “mapping databases”, e.g., BLAST-type search, such that the chromosome position of the gene is identified by sequence homology or identity with known sequence fragments which have been mapped to chromosomes.

[2262] A polypeptide and fragments and sequences thereof and antibodies specific thereto can be used to map the location of the gene encoding the polypeptide on a chromosome. This mapping can be carried out by specifically detecting the presence of the polypeptide in members of a panel of somatic cell hybrids between cells of a first species of animal from which the protein originates and cells from a second species of animal and then determining which somatic cell hybrid(s) expresses the polypeptide and noting the chromosome(s) from the first species of animal that it contains. For examples of this technique, see Pajunen et al. (1988) Cytogenet. Cell Genet. 47:37-41 and Van Keuren et al. (1986) Hum. Genet. 74:34-40. Alternatively, the presence of the polypeptide in the somatic cell hybrids can be determined by assaying an activity or property of the polypeptide, for example, enzymatic activity, as described in Bordelon-Riser et al. (1979) Somatic Cell Genetics 5:597-613 and Owerbach et al. (1978) Proc. Natl. Acad. Sci. USA 75:5640-5644.

[2263] 2. Tissue Typing

[2264] The nucleic acid sequences of the present invention can also be used to identify individuals from minute biological samples. The United States military, for example, is considering the use of restriction fragment length polymorphism (RFLP) for identification of its personnel. In this technique, an individual's genomic DNA is digested with one or more restriction enzymes, and probed on a Southern blot to yield unique bands for identification. This method does not suffer from the current limitations of “Dog Tags” which can be lost, switched, or stolen, making positive identification difficult. The sequences of the present invention are useful as additional DNA markers for RFLP (described in U.S. Pat. No. 5,272,057).

[2265] Furthermore, the sequences of the present invention can be used to provide an alternative technique which determines the actual base-by-base DNA sequence of selected portions of an individual's genome. Thus, the nucleic acid sequences described herein can be used to prepare two PCR primers from the 5′ and 3′ ends of the sequences. These primers can then be used to amplify an individual's DNA and subsequently sequence it.

[2266] Panels of corresponding DNA sequences from individuals, prepared in this manner, can provide unique individual identifications, as each individual will have a unique set of such DNA sequences due to allelic differences. The sequences of the present invention can be used to obtain such identification sequences from individuals and from tissue. The nucleic acid sequences of the invention uniquely represent portions of the human genome. Allelic variation occurs to some degree in the coding regions of these sequences, and to a greater degree in the noncoding regions. It is estimated that allelic variation between individual humans occurs with a frequency at about once per each 500 bases. Each of the sequences described herein can, to some degree, be used as a standard against which DNA from an individual can be compared for identification purposes. Because greater numbers of polymorphisms occur in the noncoding regions, fewer sequences are necessary to differentiate individuals. The noncoding sequences of SEQ ID NO: 1, 3, 5, 7, 9, 11, 13, 15, 17, 19, 21, 23, 25, 27, 29, 31, 33, 35, 37, 39, 41, 43, 45, 47, 49, 51, 53, 55, 57, 59, 61, 63, 65, 67, 69, 71, 73, 75, 77, 79, 81, 83, 85, 87, 89, 91, 93, 95, 97, 99, 101, 103, 105, 107, 109, 111, 113, 115, 117, 119, 121, 123, 125, 127, 129, 131, 133, 135, 137, 139, 141, 143, 145, 147, 149, 151, 153, 155, 157, 159, 161, and 163, can comfortably provide positive individual identification with a panel of perhaps 10 to 1,000 primers which each yield a noncoding amplified sequence of 100 bases. If predicted coding sequences, such as those in SEQ ID NO: 1, 3, 5, 7, 9, 11, 13, 15, 17, 19, 21, 23,25, 27, 29, 31, 33, 35, 37, 39, 41, 43, 45, 47, 49, 51, 53, 55, 57, 59, 61, 63, 65, 67, 69, 71, 73, 75, 77, 79, 81, 83, 85, 87, 89, 91, 93, 95, 97, 99, 101, 103, 105, 107, 109, 111, 113, 115, 117, 119, 121, 123, 125, 127, 129, 131, 133, 135, 137, 139, 141, 143, 145, 147, 149, 151, 153, 155, 157, 159, 161, and 163, are used, a more appropriate number of primers for positive individual identification would be 500 to 2,000.

[2267] If a panel of reagents from the nucleic acid sequences described herein is used to generate a unique identification database for an individual, those same reagents can later be used to identify tissue from that individual. Using the unique identification database, positive identification of the individual, living or dead, can be made from extremely small tissue samples.

[2268] 3. Use of Partial Gene Sequences in Forensic Biology DNA-based identification techniques can also be used in forensic biology. Forensic biology is a scientific field employing genetic typing of biological evidence found at a crime scene as a means for positively identifying, for example, a perpetrator of a crime. To make such an identification, PCR technology can be used to amplify DNA sequences taken from very small biological samples such as tissues, e.g., hair or skin, or body fluids, e.g., blood, saliva, or semen found at a crime scene. The amplified sequence can then be compared to a standard, thereby allowing identification of the origin of the biological sample.

[2269] The sequences of the present invention can be used to provide polynucleotide reagents, e.g., PCR primers, targeted to specific loci in the human genome, which can enhance the reliability of DNA-based forensic identifications by, for example, providing another “identification marker” (i.e. another DNA sequence that is unique to a particular individual). As mentioned above, actual base sequence information can be used for identification as an accurate alternative to patterns formed by restriction enzyme generated fragments. Sequences targeted to noncoding regions are particularly appropriate for this use as greater numbers of polymorphisms occur in the noncoding regions, making it easier to differentiate individuals using this technique. Examples of polynucleotide reagents include the nucleic acid sequences of the invention or portions thereof, e.g., fragments derived from noncoding regions having a length of at least 20 or 30 bases.

[2270] The nucleic acid sequences described herein can further be used to provide polynucleotide reagents, e.g., labeled or labelable probes which can be used in, for example, an in situ hybridization technique, to identify a specific tissue, e.g., brain tissue. This can be very useful in cases where a forensic pathologist is presented with a tissue of unknown origin. Panels of such probes can be used to identify tissue by species and/or by organ type.

[2271] C. Predictive Medicine

[2272] The present invention also pertains to the field of predictive medicine in which diagnostic assays, prognostic assays, pharmacogenomics, and monitoring clinical trails are used for prognostic (predictive) purposes to thereby treat an individual prophylactically. Accordingly, one aspect of the present invention relates to diagnostic assays for determining expression of a polypeptide or nucleic acid of the invention and/or activity of a polypeptide of the invention, in the context of a biological sample (e.g., blood, serum, cells, tissue) to thereby determine whether an individual is afflicted with a disease or disorder, or is at risk of developing a disorder, associated with aberrant expression or activity of a polypeptide of the invention, such as a proliferative disorder, e.g., psoriasis or cancer, or an angiogenic disorder. The invention also provides for prognostic (or predictive) assays for determining whether an individual is at risk of developing a disorder associated with aberrant expression or activity of a polypeptide of the invention. For example, mutations in a gene of the invention can be assayed in a biological sample. Such assays can be used for prognostic or ₅predictive purpose to thereby prophylactically treat an individual prior to the onset of a disorder characterized by or associated with aberrant expression or activity of a polypeptide of the invention.

[2273] Another aspect of the invention provides methods for expression of a nucleic acid or polypeptide of the invention or activity of a polypeptide of the invention in an individual to thereby select appropriate therapeutic or prophylactic agents for that individual (referred to herein as “pharmacogenomics”). Pharmacogenomics allows for the selection of agents (e.g., drugs) for therapeutic or prophylactic treatment of an individual based on the genotype of the individual (e.g., the genotype of the individual examined to determine the ability of the individual to respond to a particular agent).

[2274] Yet another aspect of the invention pertains to monitoring the influence of agents (e.g., drugs or other compounds) on the expression or activity of a polypeptide of the invention in clinical trials. These and other agents are described in further detail in the following sections.

[2275] 1. Diagnostic Assays

[2276] An exemplary method for detecting the presence or absence of a polypeptide or nucleic acid of the invention in a biological sample involves obtaining a biological sample from a test subject and contacting the biological sample with a compound or an agent capable of detecting a polypeptide or nucleic acid (e.g., mRNA, genomic DNA) of the invention such that the presence of a polypeptide or nucleic acid of the invention is detected in the biological sample. A preferred agent for detecting mRNA or genomic DNA encoding a polypeptide of the invention is a labeled nucleic acid probe capable of hybridizing to mRNA or genomic DNA encoding a polypeptide of the invention. The nucleic acid probe can be, for example, a full-length cDNA, such as the nucleic acid of SEQ ID NO: 1, 3, 5, 7, 9, 11, 13, 15, 17, 19, 21, 23, 25, 27, 29, 31, 33, 35, 37, 39, 41, 43, 45, 47, 49, 51, 53, 55, 57, 59, 61, 63, 65, 67, 69, 71, 73, 75, 77, 79, 81, 83, 85, 87, 89, 91, 93, 95, 97, 99, 101, 103, 105, 107, 109, 111, 113, 115, 117, 119, 121, 123, 125, 127, 129, 131, 133, 135, 137, 139, 141, 143, 145, 147, 149, 151, 153, 155, 157, 159, 161, and 163, or a portion thereof, such as an oligonucleotide of at least 15, 30, 50, 100, 250 or 500 contiguous nucleotides in length and sufficient to specifically hybridize under stringent conditions to a mRNA or genomic DNA encoding a polypeptide of the invention. Other suitable probes for use in the diagnostic assays of the invention are described herein.

[2277] A preferred agent for detecting a polypeptide of the invention is an antibody capable of binding to a polypeptide of the invention, preferably an antibody with a detectable label. Antibodies can be polyclonal, or more preferably, monoclonal. An intact antibody, or a fragment thereof (e.g., Fab or F(ab′)₂) can be used. The term “labeled”, with regard to the probe or antibody, is intended to encompass direct labeling of the probe or antibody by coupling (i.e., physically linking) a detectable substance to the probe or antibody, as well as indirect labeling of the probe or antibody by reactivity with another reagent that is directly labeled. Examples of indirect labeling include detection of a primary antibody using a fluorescently labeled secondary antibody and end-labeling of a DNA probe with biotin such that it can be detected with fluorescently labeled streptavidin. The term “biological sample” is intended to include tissues, cells and biological fluids isolated from a subject, as well as tissues, cells and fluids present within a subject. That is, the detection method of the invention can be used to detect mRNA, protein, or genomic DNA in a biological sample in vitro as well as in vivo. For example, in vitro techniques for detection of mRNA include Northern hybridizations and in situ hybridizations. In vitro techniques for detection of a polypeptide of the invention include enzyme linked immunosorbent assays (ELISAs), Western blots, immunoprecipitations and immunofluorescence. In vitro techniques for detection of genomic DNA include Southern hybridizations. Furthermore, in vivo techniques for detection of a polypeptide of the invention include introducing into a subject a labeled antibody directed against the polypeptide. For example, the antibody can be labeled with a radioactive marker whose presence and location in a subject can be detected by standard imaging techniques.

[2278] In one embodiment, the biological sample contains protein molecules from the test subject. Alternatively, the biological sample can contain mRNA molecules from the test subject or genomic DNA molecules from the test subject. A preferred biological sample is a peripheral blood leukocyte sample isolated by conventional means from a subject.

[2279] In another embodiment, the methods further involve obtaining a control biological sample from a control subject, contacting the control sample with a compound or agent capable of detecting a polypeptide of the invention or MnRNA or genomic DNA encoding a polypeptide of the invention, such that the presence of the polypeptide or mRNA or genomic DNA encoding the polypeptide is detected in the biological sample, and comparing the presence of the polypeptide or mRNA or genomic DNA encoding the polypeptide in the control sample with the presence of the polypeptide or mRNA or genomic DNA encoding the polypeptide in the test sample.

[2280] The invention also encompasses kits for detecting the presence of a polypeptide or nucleic acid of the invention in a biological sample (a test sample). Such kits can be used to determine if a subject is suffering from or is at increased risk of developing a disorder associated with aberrant expression of a INTERCEPT 258, INTERCEPT 307 and INTERCEPT 340, MANGO 003, MANGO 245, MANGO 346, MANGO 347, MANGO 349, and MANGO 511, and TANGO 128, TANGO 136, TANGO 140, TANGO 176, TANGO 197, TANGO 201, TANGO 204, TANGO 206, TANGO 209, TANGO 212, TANGO 213, TANGO 214, TANGO 216, TANGO 221, TANGO 222, TANGO 223, TANGO 224, TANGO 244, TANGO 246, TANGO 253, TANGO 257, TANGO 261, TANGO 262, TANGO 266, TANGO 267, TANGO 272, TANGO 275, TANGO 295, TANGO 315, TANGO 330, TANGO 339, TANGO 354, TANGO 358, TANGO 361, TANGO 365, TANGO 368, TANGO 369, TANGO 378, TANGO 383, TANGO 437, TANGO 480, and TANGO 499 gene as discussed, for example, in sections above relating to uses of the sequences of the invention.

[2281] In another example, kits can be used to determine if a subject is suffering from or is at risk for disorders involving INTERCEPT 258, INTERCEPT 307 and INTERCEPT 340, MANGO 003, MANGO 245, MANGO 346, MANGO 347, MANGO 349, and MANGO 511, and TANGO 128, TANGO 136, TANGO 140, TANGO 176, TANGO 197, TANGO 201, TANGO 204, TANGO 206, TANGO 209, TANGO 212, TANGO 213, TANGO 214, TANGO 216, TANGO 221, TANGO 222, TANGO 223, TANGO 224, TANGO 244, TANGO 246, TANGO 253, TANGO 257, TANGO 261, TANGO 262, TANGO 266, TANGO 267, TANGO 272, TANGO 275, TANGO 295, TANGO 315, TANGO 330, TANGO 339, TANGO 354, TANGO 358, TANGO 361, TANGO 365, TANGO 368, TANGO 369, TANGO 378, TANGO 383, TANGO 437, TANGO 480, and TANGO 499.

[2282] In another example, kits can be used to determine if a subject is suffering from or is at risk for which are associated with aberrant INTERCEPT 258, INTERCEPT 307 and INTERCEPT 340, MANGO 003, MANGO 245, MANGO 346, MANGO 347, MANGO 349, and MANGO 511, and TANGO 128, TANGO 136, TANGO 140, TANGO 176, TANGO 197, TANGO 201, TANGO 204, TANGO 206, TANGO 209, TANGO 212, TANGO 213, TANGO 214, TANGO 216, TANGO 221, TANGO 222, TANGO 223, TANGO 224, TANGO 244, TANGO 246, TANGO 253, TANGO 257, TANGO 261, TANGO 262, TANGO 266, TANGO 267, TANGO 272, TANGO 275, TANGO 295, TANGO 315, TANGO 330, TANGO 339, TANGO 354, TANGO 358, TANGO 361, TANGO 365, TANGO 368, TANGO 369, TANGO 378, TANGO 383, TANGO 437, TANGO 480, and TANGO 499 family member activity and/or expression.

[2283] The kit, for example, can comprise a labeled compound or agent capable of detecting the polypeptide or mRNA encoding the polypeptide in a biological sample and means for determining the amount of the polypeptide or mRNA in the sample (e.g. an antibody which binds the polypeptide or an oligonucleotide probe which binds to DNA or mRNA encoding the polypeptide). Kits can also include instructions for observing that the tested subject is suffering from or is at risk of developing a disorder associated with aberrant expression of the polypeptide if the amount of the polypeptide or mRNA encoding the polypeptide is above or below a normal level.

[2284] For antibody-based kits, the kit can comprise, for example: (1) a first antibody (e.g., attached to a solid support) which binds to a polypeptide of the invention; and, optionally, (2) a second, different antibody which binds to either the polypeptide or the first antibody and is conjugated to a detectable agent.

[2285] For oligonucleotide-based kits, the kit can comprise, for example: (1) an oligonucleotide, e.g., a detectably labeled oligonucleotide, which hybridizes to a nucleic acid sequence encoding a polypeptide of the invention or (2) a pair of primers useful for amplifying a nucleic acid molecule encoding a polypeptide of the invention. The kit can also comprise, e.g., a buffering agent, a preservative, or a protein stabilizing agent. The kit can also comprise components necessary for detecting the detectable agent (e.g., an enzyme or a substrate). The kit can also contain a control sample or a series of control samples which can be assayed and compared to the test sample contained. Each component of the kit is usually enclosed within an individual container and all of the various containers are within a single package along with instructions for observing whether the tested subject is suffering from or is at risk of developing a disorder associated with aberrant expression of the polypeptide.

[2286] 2. Prognostic Assays

[2287] The methods described herein can furthermore be utilized as diagnostic or prognostic assays to identify subjects having or at risk of developing a disease or disorder associated with aberrant expression or activity of a polypeptide of the invention. For example, the assays described herein, such as the preceding diagnostic assays or the following assays, can be utilized to identify a subject having or at risk of developing a disorder associated with aberrant expression or activity of a polypeptide of the invention, e.g., an immunologic disorder, or embryonic disorders. Alternatively, the prognostic assays can be utilized to identify a subject having or at risk for developing such a disease or disorder. Thus, the present invention provides a method in which a test sample is obtained from a subject and a polypeptide or nucleic acid (e.g., mRNA, genomic DNA) of the invention is detected, wherein the presence of the polypeptide or nucleic acid is diagnostic for a subject having or at risk of developing a disease or disorder associated with aberrant expression or activity of the polypeptide. As used herein, a “test sample” refers to a biological sample obtained from a subject of interest. For example, a test sample can be a biological fluid (e.g., serum), cell sample, or tissue.

[2288] The prognostic assays described herein, for example, can be used to identify a subject having or at risk of developing disorders such as disorders discussed, for example, in sections above relating to uses of the sequences of the invention. For example, prognostic assays described herein can be used to identify a subject having or at risk of developing immunological disorders, e.g., autoimmune disorders (e.g., arthritis, graft rejection (e.g., allograft rejection), T cell disorders (e.g., AIDS)), inflammatory disorders (e.g., bacterial infection, psoriasis, septicemia, cerebral malaria, inflammatory bowel disease, arthritis (e.g., rheumatoid arthritis, osteoarthritis)), and allergic inflammatory disorders (e.g., asthma, psoriasis), which are associated with aberrant TANGO 315, TANGO 330, TANGO 437, and TANGO 480 activity and/or expression.

[2289] In another example, prognostic assays described herein can be used to identify a subject having or at risk of developing brain-related disorders, inflammations (e.g., bacterial and viral meningitis, encephalitis, and cerebral toxoplasmosis), and tumors (e.g., astrocytoma), and to treat injury or trauma to the brain, which are associated with aberrant TANGO 330 family member activity and/or expression. In another example, prognostic assays described herein can be used to identify a subject having or at risk of developing adrenal-related disorders which are associated with aberrant TANGO 330 family member activity and/or expression. In another example, prognostic assays described herein can be used to identify a subject having or at risk of developing myeloid disorders such as acute or chronic myeloid leukemia which are associated with aberrant TANGO 315 family activity and/or expression. In another example, prognostic assays described herein can be used to identify a subject having or at risk of developing leptin-related disorders (e.g., neuroendocrine disorders, obesity, and anorexia nervosa) and embryonic disorders which are associated with aberrant TANGO 315 family member activity and/or expression. In another example, prognostic assays described herein can be used to identify a subject having or at risk of developing ion transport disorders which are associated with aberrant TANGO 437 family member activity and/or expression. In yet another example, prognostic assays described herein can be used to identify a subject having or at risk of developing keratinocyte disorders such as squamous cell carcinoma which are associated with aberrant TANGO 480 family member activity and/or expression.

[2290] Furthermore, the prognostic assays described herein can be used to determine whether a subject can be administered an agent (e.g., an agonist, antagonist, peptidomimetic, protein, peptide, nucleic acid, small molecule, or other drug candidate) to treat a disease or disorder associated with aberrant expression or activity of a polypeptide of the invention. For example, such methods can be used to determine whether a subject can be effectively treated with a specific agent or class of agents (e.g., agents of a type which decrease activity of the polypeptide). Thus, the present invention provides methods for determining whether a subject can be effectively treated with an agent for a disorder associated with aberrant expression or activity of a polypeptide of the invention in which a test sample is obtained and the polypeptide or nucleic acid encoding the polypeptide is detected (e.g., wherein the presence of the polypeptide or nucleic acid is diagnostic for a subject that can be administered the agent to treat a disorder associated with aberrant expression or activity of the polypeptide).

[2291] The methods of the invention can also be used to detect genetic lesions or mutations in a gene of the invention, thereby determining if a subject with the lesioned gene is at risk for a disorder characterized aberrant expression or activity of a polypeptide of the invention. In preferred embodiments, the methods include detecting, in a sample of cells from the subject, the presence or absence of a genetic lesion or mutation characterized by at least one of an alteration affecting the integrity of a gene encoding the polypeptide of the invention, or the mis-expression of the gene encoding the polypeptide of the invention. For example, such genetic lesions or mutations can be detected by ascertaining the existence of at least one of: 1) a deletion of one or more nucleotides from the gene; 2) an addition of one or more nucleotides to the gene; 3) a substitution of one or more nucleotides of the gene; 4) a chromosomal rearrangement of the gene; 5) an alteration in the level of a messenger RNA transcript of the gene; 6) an aberrant modification of the gene, such as of the methylation pattern of the genomic DNA; 7) the presence of a non-wild type splicing pattern of a messenger RNA transcript of the gene; 8) a non-wild type level of a the protein encoded by the gene; 9) an allelic loss of the gene; and 10) an inappropriate post-translational modification of the protein encoded by the gene. As described herein, there are a large number of assay techniques known in the art which can be used for detecting lesions in a gene.

[2292] In certain embodiments, detection of the lesion involves the use of a probe/primer in a polymerase chain reaction (PCR) (see, e.g., U.S. Pat. Nos. 4,683,195 and 4,683,202), such as anchor PCR or RACE PCR, or, alternatively, in a ligation chain reaction (LCR) (see, 35 e.g., Landegran et al. (1988) Science 241:1077-1080; and Nakazawa et al. (1994) Proc. Natl. Acad. Sci. USA 91:360-364), the latter of which can be particularly useful for detecting point mutations in a gene (see, e.g., Abravaya et al. (1995) Nucleic Acids Res. 23:675-682). This method can include the steps of collecting a sample of cells from a patient, isolating nucleic acid (e.g., genomic, mRNA or both) from the cells of the sample, contacting the nucleic acid sample with one or more primers which specifically hybridize to the selected gene under conditions such that hybridization and amplification of the gene (if present) occurs, and detecting the presence or absence of an amplification product, or detecting the size of the amplification product and comparing the length to a control sample. It is anticipated that PCR and/or LCR may be desirable to use as a preliminary amplification step in conjunction with any of the techniques used for detecting mutations described herein.

[2293] Alternative amplification methods include: self sustained sequence replication (Guatelli et al. (1990) Proc. Natl. Acad. Sci. USA 87:1874-1878), transcriptional amplification system (Kwoh, et al. (1989) Proc. Natl. Acad. Sci. USA 86:1173-1177), Q-Beta Replicase (Lizardi et al. (1988) Bio/Technology 6:1197), or any other nucleic acid amplification method, followed by the detection of the amplified molecules using techniques well known to those of skill in the art. These detection schemes are especially useful for the detection of nucleic acid molecules if such molecules are present in very low numbers.

[2294] In an alternative embodiment, mutations in a selected gene from a sample cell can be identified by alterations in restriction enzyme cleavage patterns. For example, sample and control DNA is isolated, amplified (optionally), digested with one or more restriction endonucleases, and fragment length sizes are determined by gel electrophoresis and compared. Differences in fragment length sizes between sample and control DNA indicates mutations in the sample DNA. Moreover, the use of sequence specific ribozymes (see, e.g., U.S. Pat. No. 5,498,531) can be used to score for the presence of specific mutations by development or loss of a ribozyme cleavage site.

[2295] In other embodiments, genetic mutations can be identified by hybridizing a sample and control nucleic acids, e.g., DNA or RNA, to high density arrays containing hundreds or thousands of oligonucleotides probes (Cronin et al. (1996) Human Mutation 7:244-255; Kozal et al. (1996) Nature Medicine 2:753-759). For example, genetic mutations can be identified in two-dimensional arrays containing light-generated DNA probes as described in Cronin et al., supra. Briefly, a first hybridization array of probes can be used to scan through long stretches of DNA in a sample and control to identify base changes between the sequences by making linear arrays of sequential overlapping probes. This step allows the identification of point mutations. This step is followed by a second hybridization array that allows the characterization of specific mutations by using smaller, specialized probe arrays complementary to all variants or mutations detected. Each mutation array is composed of parallel probe sets, one complementary to the wild-type gene and the other complementary to the mutant gene.

[2296] In yet another embodiment, any of a variety of sequencing reactions known in the art can be used to directly sequence the selected gene and detect mutations by comparing the sequence of the sample nucleic acids with the corresponding wild-type (control) sequence. Examples of sequencing reactions include those based on techniques developed by Maxim and Gilbert ((1977) Proc. Natl. Acad. Sci. USA 74:560) or Sanger ((1977) Proc. Natl. Acad. Sci. USA 74:5463). It is also contemplated that any of a variety of automated sequencing procedures can be utilized when performing the diagnostic assays ((1995) Bio/Techniques 19:448), including sequencing by mass spectrometry (see, e.g., PCT Publication No. WO 94/16101; Cohen et al. (1996) Adv. Chromatogr. 36:127-162; and Griffin et al. (1993) Appl. Biochem. Biotechnol. 38:147-159).

[2297] Other methods for detecting mutations in a selected gene include methods in which protection from cleavage agents is used to detect mismatched bases in RNA/RNA or RNA/DNA heteroduplexes (Myers et al. (1985) Science 230:1242). In general, the technique of “mismatch cleavage” entails providing heteroduplexes formed by hybridizing (labeled) RNA or DNA containing the wild-type sequence with potentially mutant RNA or DNA obtained from a tissue sample. The double-stranded duplexes are treated with an agent which cleaves single-stranded regions of the duplex such as which will exist due to basepair mismatches between the control and sample strands. RNA/DNA duplexes can be treated with RNase to digest mismatched regions, and DNA/DNA hybrids can be treated with S1 nuclease to digest mismatched regions.

[2298] In other embodiments, either DNA/DNA or RNA/DNA duplexes can be treated with hydroxylamine or osmium tetroxide and with piperidine in order to digest mismatched regions. After digestion of the mismatched regions, the resulting material is then separated by size on denaturing polyacrylamide gels to determine the site of mutation. See, e.g., Cotton et al. (1988) Proc. Natl. Acad. Sci. USA 85:4397; Saleeba et al. (1992) Methods Enzymol. 217:286-295. In a preferred embodiment, the control DNA or RNA can be labeled for detection.

[2299] In still another embodiment, the mismatch cleavage reaction employs one or more proteins that recognize mismatched base pairs in double-stranded DNA (so called “DNA mismatch repair” enzymes) in defined systems for detecting and mapping point mutations in cDNAs obtained from samples of cells. For example, the mutY enzyme of E. coli cleaves A at G/A mismatches and the thymidine DNA glycosylase from HeLa cells cleaves T at GIT mismatches (Hsu et al. (1994) Carcinogenesis 15:1657-1662). According to an exemplary embodiment, a probe based on a selected sequence, e.g., a wild-type sequence, is hybridized to a cDNA or other DNA product from a test cell(s). The duplex is treated with a DNA mismatch repair enzyme, and the cleavage products, if any, can be detected from electrophoresis protocols or the like. See, e.g., U.S. Pat. No. 5,459,039.

[2300] In other embodiments, alterations in electrophoretic mobility will be used to identify mutations in genes. For example, single strand conformation polymorphism (SSCP) may be used to detect differences in electrophoretic mobility between mutant and wild type nucleic acids (Orita et al. (1989) Proc. Natl. Acad. Sci. USA 86:2766; see also Cotton (1993) Mutat. Res. 285:125-144; Hayashi (1992) Genet. Anal Tech. Appl. 9:73-79). Single-stranded DNA fragments of sample and control nucleic acids will be denatured and allowed to renature. The secondary structure of single-stranded nucleic acids varies according to sequence, and the resulting alteration in electrophoretic mobility enables the detection of even a single base change. The DNA fragments may be labeled or detected with labeled probes. The sensitivity of the assay may be enhanced by using RNA (rather than DNA), in which the secondary structure is more sensitive to a change in sequence. In a preferred embodiment, the subject method utilizes heteroduplex analysis to separate double stranded heteroduplex molecules on the basis of changes in electrophoretic mobility (Keen et al. (1991) Trends Genet. 7:5).

[2301] In yet another embodiment, the movement of mutant or wild-type fragments in polyacrylamide gels containing a gradient of denaturant is assayed using denaturing gradient gel electrophoresis (DGGE) (Myers et al. (1985) Nature 313:495). When DGGE is used as the method of analysis, DNA will be modified to insure that it does not completely denature, for example by adding a ′GC clamp of approximately 40 bp of high-melting GC-rich DNA by PCR. In a further embodiment, a temperature gradient is used in place of a denaturing gradient to identify differences in the mobility of control and sample DNA (Rosenbaum and Reissner (1987) Biophys. Chem. 265:12753).

[2302] Examples of other techniques for detecting point mutations include, but are not limited to, selective oligonucleotide hybridization, selective amplification, or selective primer extension. For example, oligonucleotide primers may be prepared in which the known mutation is placed centrally and then hybridized to target DNA under conditions which permit hybridization only if a perfect match is found (Saiki et al. (1986) Nature 324:163); Saiki et al. (1989) Proc. Natl. Acad. Sci. USA 86:6230). Such allele specific oligonucleotides are hybridized to PCR amplified target DNA or a number of different mutations when the oligonucleotides are attached to the hybridizing membrane and hybridized with labeled target DNA.

[2303] Alternatively, allele specific amplification technology which depends on selective PCR amplification may be used in conjunction with the instant invention. Oligonucleotides used as primers for specific amplification may carry the mutation of interest in the center of the molecule (so that amplification depends on differential hybridization) (Gibbs et al. (1989) Nucleic Acids Res. 17:2437-2448) or at the extreme 3′ end of one primer where, under appropriate conditions, mismatch can prevent or reduce polymerase extension (Prossner (1993) Tibtech 11:238). In addition, it may be desirable to introduce a novel restriction site in the region of the mutation to create cleavage-based detection (Gasparini et al. (1992) Mol. Cell Probes 6:1). It is anticipated that in certain embodiments amplification may also be performed using Taq ligase for amplification (Barany (1991) Proc. Natl. Acad. Sci. USA 88:189). In such cases, ligation will occur only if there is a perfect match at the 3′ end of the 5′ sequence making it possible to detect the presence of a known mutation at a specific site by looking for the presence or absence of amplification.

[2304] The methods described herein may be performed, for example, by utilizing pre-packaged diagnostic kits comprising at least one probe nucleic acid or antibody reagent described herein, which may be conveniently used, e.g., in clinical settings to diagnose patients exhibiting symptoms or family history of a disease or illness involving a gene encoding a polypeptide of the invention. Furthermore, any cell type or tissue, e.g., preferably peripheral blood leukocytes, in which the polypeptide of the invention is expressed may be utilized in the prognostic assays described herein.

[2305] 3. Pharmacogenomics

[2306] Agents, or modulators which have a stimulatory or inhibitory effect on activity or expression of a polypeptide of the invention as identified by a screening assay described herein can be administered to individuals to treat (prophylactically or therapeutically) disorders associated with aberrant activity of the polypeptide. In conjunction with such treatment, the pharmacogenomics (i.e., the study of the relationship between an individual's genotype and that individual's response to a foreign compound or drug) of the individual may be considered. Differences in metabolism of therapeutics can lead to severe toxicity or therapeutic failure by altering the relation between dose and blood concentration of the pharmacologically active drug. Thus, the pharmacogenomics of the individual permits the selection of effective agents (e.g., drugs) for prophylactic or therapeutic treatments based on a consideration of the individual's genotype. Such pharmacogenomics can further be used to determine appropriate dosages and therapeutic regimens. Accordingly, the activity of a polypeptide of the invention, expression of a nucleic acid of the invention, or mutation content of a gene of the invention in an individual can be determined to thereby select appropriate agent(s) for therapeutic or prophylactic treatment of the individual.

[2307] Pharmacogenomics deals with clinically significant hereditary variations in the response to drugs due to altered drug disposition and abnormal action in affected persons. See, e.g., Linder (1997) Clin. Chem. 43(2):254-266. In general, two types of pharmacogenetic conditions can be differentiated. Genetic conditions transmitted as a single factor altering the way drugs act on the body are referred to as “altered drug action.” Genetic conditions transmitted as single factors altering the way the body acts on drugs are referred to as “altered drug metabolism”. These pharmacogenetic conditions can occur either as rare defects or as polymorphisms. For example, glucose-6-phosphate dehydrogenase deficiency (G6PD) is a common inherited enzymopathy in which the main clinical complication is haemolysis after ingestion of oxidant drugs (anti-malarials, sulfonamides, analgesics, nitrofurans) and consumption of fava beans.

[2308] As an illustrative embodiment, the activity of drug metabolizing enzymes is a major determinant of both the intensity and duration of drug action. The discovery of genetic polymorphisms of drug metabolizing enzymes (e.g., N-acetyltransferase 2 (NAT 2) and cytochrome P450 enzymes CYP2D6 and CYP2C19) has provided an explanation as to why some patients do not obtain the expected drug effects or show exaggerated drug response and serious toxicity after taking the standard and safe dose of a drug. These polymorphisms are expressed in two phenotypes in the population, the extensive metabolizer (EM) and poor metabolizer (PM). The prevalence of PM is different among different populations. For example, the gene coding for CYP2D6 is highly polymorphic and several mutations have been identified in PM, which all lead to the absence of functional CYP2D6. Poor metabolizers of CYP2D6 and CYP2C19 quite frequently experience exaggerated drug response and side effects when they receive standard doses. If a metabolite is the active therapeutic moiety, a PM will show no therapeutic response, as demonstrated for the analgesic effect of codeine mediated by its CYP2D6-formed metabolite morphine. The other extreme are the so called ultra-rapid metabolizers who do not respond to standard doses. Recently, the molecular basis of ultra-rapid metabolism has been identified to be due to CYP2D6 gene amplification.

[2309] Thus, the activity of a polypeptide of the invention, expression of a nucleic acid encoding the polypeptide, or mutation content of a gene encoding the polypeptide in an individual can be determined to thereby select appropriate agent(s) for therapeutic or prophylactic treatment of the individual. In addition, pharmacogenetic studies can be used to apply genotyping of polymorphic alleles encoding drug-metabolizing enzymes to the identification of an individual's drug responsiveness phenotype. This knowledge, when applied to dosing or drug selection, can avoid adverse reactions or therapeutic failure and thus enhance therapeutic or prophylactic efficiency when treating a subject with a modulator of activity or expression of the polypeptide, such as a modulator identified by one of the exemplary screening assays described herein.

[2310] 4. Monitoring of Effects During Clinical Trials

[2311] Monitoring the influence of agents (e.g., drugs, compounds) on the expression or activity of a polypeptide of the invention (e.g., the ability to modulate aberrant cell proliferation chemotaxis, and/or differentiation) can be applied not only in basic drug screening, but also in clinical trials. For example, the effectiveness of an agent, as determined by a screening assay as described herein, to increase gene expression, protein levels or protein activity, can be monitored in clinical trials of subjects exhibiting decreased gene expression, protein levels, or protein activity. Alternatively, the effectiveness of an agent, as determined by a screening assay, to decrease gene expression, protein levels or protein activity, can be monitored in clinical trials of subjects exhibiting increased gene expression, protein levels, or protein activity. In such clinical trials, expression or activity of a polypeptide of the invention and preferably, that of other polypeptide that have been implicated in for example, a cellular proliferation disorder, can be used as a marker of the immune responsiveness of a particular cell.

[2312] For example, and not by way of limitation, genes, including those of the invention, that are modulated in cells by treatment with an agent (e.g., compound, drug or small molecule) which modulates activity or expression of a polypeptide of the invention (e.g., as identified in a screening assay described herein) can be identified. Thus, to study the effect of agents on cellular proliferation disorders, for example, in a clinical trial, cells can be isolated and RNA prepared and analyzed for the levels of expression of a gene of the invention and other genes implicated in the disorder. The levels of gene expression (i.e., a gene expression pattern) can be quantified by Northern blot analysis or RT-PCR, as described herein, or alternatively by measuring the amount of protein produced, by one of the methods as described herein, or by measuring the levels of activity of a gene of the invention or other genes. In this way, the gene expression pattern can serve as a marker, indicative of the physiological response of the cells to the agent. Accordingly, this response state may be determined before, and at various points during, treatment of the individual with the agent.

[2313] In a preferred embodiment, the present invention provides a method for monitoring the effectiveness of treatment of a subject with an agent (e.g., an agonist, antagonist, peptidomimetic, protein, peptide, nucleic acid, small molecule, or other drug candidate identified by the screening assays described herein) comprising the steps of (i) obtaining a pre-administration sample from a subject prior to administration of the agent; (ii) detecting the level of the polypeptide or nucleic acid of the invention in the preadministration sample; (iii) obtaining one or more post-administration samples from the subject; (iv) detecting the level the of the polypeptide or nucleic acid of the invention in the post-administration samples; (v) comparing the level of the polypeptide or nucleic acid of the invention in the pre-administration sample with the level of the polypeptide or nucleic acid of the invention in the post-administration sample or samples; and (vi) altering the administration of the agent to the subject accordingly. For example, increased administration of the agent may be desirable to increase the expression or activity of the polypeptide to higher levels than detected, i.e., to increase the effectiveness of the agent. Alternatively, decreased administration of the agent may be desirable to decrease expression or activity of the polypeptide to lower levels than detected, i.e., to decrease the effectiveness of the agent.

[2314] C. Methods of Treatment

[2315] The present invention provides for both prophylactic and therapeutic methods of treating a subject at risk of (or susceptible to) a disorder or having a disorder associated with aberrant expression or activity of a polypeptide of the invention, as discussed, for example, in sections above relating to uses of the sequences of the invention. For example, disorders characterized by aberrant expression or activity of the polypeptides of the invention include immunologic disorders, prostate disorders, endothelial cell disorders, developmental disorders, embryonic disorders, and neurological disorders. The nucleic acids, polypeptides, and modulators thereof of the invention can be used to treat immunologic diseases and disorders (e.g., monocyte disorders and platelet disorders), prostate disorders, embryonic disorders, and neurological disorders, as well as other disorders described herein.

[2316] 1. Prophylactic Methods

[2317] In one aspect, the invention provides a method for preventing in a subject, a disease or condition associated with an aberrant expression or activity of a polypeptide of the invention, by administering to the subject an agent which modulates expression or at least one activity of the polypeptide. Subjects at risk for a disease which is caused or contributed to by aberrant expression or activity of a polypeptide of the invention can be identified by, for example, any or a combination of diagnostic or prognostic assays as described herein. Administration of a prophylactic agent can occur prior to the manifestation of symptoms characteristic of the aberrancy, such that a disease or disorder is prevented or, alternatively, delayed in its progression. Depending on the type of aberrancy, for example, an agonist or antagonist agent can be used for treating the subject. The prophylactic agents described herein, for example, can be used to treat a subject at risk of developing disorders such as disorders discussed for example, in Sections above relative to rhe uses of the sequences of the invention. For example, an antagonist of an TANGO 315, TANGO 330, TANGO 437, and TANGO 480 protein may be used to modulate or treat an immunological disorder. The appropriate agent can be determined based on screening assays described herein.

[2318] 2. Therapeutic Methods

[2319] Another aspect of the invention pertains to methods of modulating expression or activity of a polypeptide of the invention for therapeutic purposes. The modulatory method of the invention involves contacting a cell with an agent that modulates one or more of the activities of the polypeptide. An agent that modulates activity can be an agent as described herein, such as a nucleic acid or a protein, a naturally-occurring cognate ligand of the polypeptide, a peptide, a peptidomimetic, or other small molecule. In one embodiment, the agent stimulates one or more of the biological activities of the polypeptide. Examples of such stimulatory agents include the active polypeptide of the invention and a nucleic acid molecule encoding the polypeptide of the invention that has been introduced into the cell. In another embodiment, the agent inhibits one or more of the biological activities of the polypeptide of the invention. Examples of such inhibitory agents include antisense nucleic acid molecules and antibodies. These modulatory methods can be performed in vitro (e.g., by culturing the cell with the agent) or, alternatively, in vivo (e.g., by administering the agent to a subject). As such, the present invention provides methods of treating an individual afflicted with a disease or disorder characterized by aberrant expression or activity of a polypeptide of the invention. In one embodiment, the method involves administering an agent (e.g., an agent identified by a screening assay described herein), or combination of agents that modulates (e.g., upregulates or downregulates) expression or activity. In another embodiment, the method involves administering a polypeptide of the invention or a nucleic acid molecule of the invention as therapy to compensate for reduced or aberrant expression or activity of the polypeptide.

[2320] Stimulation of activity is desirable in situations in which activity or expression is abnormally low or downregulated and/or in which increased activity is likely to have a beneficial effect. Conversely, inhibition of activity is desirable in situations in which activity or expression is abnormally high or upregulated and/or in which decreased activity is likely to have a beneficial effect.

[2321] This invention is further illustrated by the following examples which should not be construed as limiting. The contents of all references, patents and published patent applications cited throughout this application are hereby incorporated by reference.

[2322] Deposit of Clones

[2323] Clones containing cDNA molecules encoding TANGO 128, TANGO 140-1, TANGO 140-2 and TANGO 197 were deposited with the American Type Culture Collection (Manassas, Va.) as composite deposits.

[2324] Clones encoding TANGO 128, TANGO 140-1, TANGO 140-2 and TANGO 197 were deposited on Nov. 20, 1998 with the American Type Culture Collection under Accession Number ATCC® 98999, (also referred to herein as mix EpDHMix1) from which each clone comprising a particular cDNA clone is obtainable. This deposit is a mixture of five strains, each carrying one recombinant plasmid harboring a particular cDNA clone. To distinguish the strains and isolate a strain harboring a particular cDNA clone, one can first streak out an aliquot of the mixture to single colonies on nutrient medium (e.g., LB plates) supplemented with 100 μg/ml ampicillin, grow single colonies, and then extract the plasmid DNA using a standard minipreparation procedure. Next, one can digest a sample of the DNA minipreparation with a combination of the restriction enzymes Sal I and Not I and resolve the resultant products on a 0.8% agarose gel using standard DNA electrophoresis conditions. The digest will liberate fragments as follows:

[2325] TANGO 128 (EpDH237) 2.8 kb and 4.3 kb

[2326] TANGO 140-1 (EpDH137) 1.6 kb and 3.0 kb

[2327] TANGO 140-2 (EpDH185) 3.4 kb and 4.3 kb

[2328] TANGO 197 (EpDH213) 2.3 kb and 3.0 kb

[2329] Clones containing cDNA molecules encoding human HtrA-2 (clone EpT214) was deposited with the American Type Culture Collection (Manassas, Va.) on Sep. 25, 1998 as Accession Number 98899, as part of a composite deposit representing a mixture of five strains, each carrying one recombinant plasmid harboring a particular cDNA clone.

[2330] To distinguish the strains and isolate a strain harboring a particular cDNA clone, an aliquot of the mixture can be streaked out to single colonies on nutrient medium (e.g., LB plates) supplemented with 100 μg/ml ampicillin, single colonies grown, and then plasmid DNA extracted using a standard minipreparation procedure. Next, a sample of the DNA minipreparation can be digested with a combination of the restriction enzymes Sal I and Not and the resultant products resolved on a 0.8% agarose gel using standard DNA electrophoresis conditions. The digest liberates fragments as follows:

[2331] HtrA-2:2.6 kb

[2332] Clones containing cDNA molecules encoding human TANGO 201 and TANGO 223 were deposited on Jan. 22, 1999 with the American Type Culture Collection (Manassas, Va.) under accession number ATCC™ 207081, from which each cDNA clone is obtainable. This deposit is a mixture of two strains, each carrying one recombinant plasmid. To distinguish the strains and isolate a strain harboring a particular cDNA clone, one can first streak out an aliquot of the mixture to single colonies on nutrient medium (e.g., LB plates) supplemented with 100 μg/ml ampicillin, grow single colonies, and then extract the plasmid DNA using a standard minipreparation procedure. Next, one can digest a sample of the DNA minipreparation with a combination of the restriction enzymes Sal I and Not I and resolve the resultant products on a 0.8% agarose gel using standard DNA electrophoresis conditions. The digest will liberate fragments as follows:

[2333] TANGO 201(EpT201), 2.2 kb

[2334] TANGO 223 (EpT223), 1.45 kb

[2335] Clones containing cDNA molecules encoding human TANGO 216, TANGO 261, TANGO 262, TANGO 266, and TANGO 267 (clones EpT216, EpT261, EpT262, EpT266, and EpT267, respectively), were deposited with the American Type Culture Collection (Manassas, Va.) on Mar. 26, 1999 as Accession Number 207176, as part of a composite deposit representing a mixture of five strains, each carrying one recombinant plasmid harboring a particular cDNA clone.

[2336] To distinguish the strains and isolate a strain harboring a particular cDNA clone, an aliquot of the mixture can be streaked out to single colonies on nutrient medium (e.g., LB plates) supplemented with 100 μg/ml ampicillin, single colonies grown, and then plasmid DNA extracted using a standard minipreparation procedure. Next, a sample of the DNA minipreparation can be digested with a combination of the restriction enzymes Sal I and Not I and the resultant products resolved on a 0.8% agarose gel using standard DNA electrophoresis conditions. The digest liberates fragments as follows:

[2337] TANGO 216 (EpT216): 4.4 kb

[2338] TANGO 261 (EpT261): 1.9 kb

[2339] TANGO 262 (EpT262): 1.5 kb

[2340] TANGO 266 (EpT266): 0.4 kb

[2341] TANGO 267 (EpT267): 2.8 kb

[2342] Clones containing cDNA molecules encoding human TANGO 253, (clone EpT253) human TANGO 257 (EpT257), and human INTERCEPT 258 (clone EpT258) were deposited with the American Type Culture Collection, 10801 University Boulevard, Manassas, Va., 20110-2209, on Apr. 21, 1999 as Accession Number 207222, as part of a composite deposit representing a mixture of strains, each carrying one recombinant plasmid harboring a particular cDNA clone.

[2343] For this composite deposit, to distinguish the strains and isolate a strain harboring a particular cDNA clone, an aliquot of the mixture can be streaked out to single colonies on nutrient medium (e.g., LB plates) supplemented with 100g/ml ampicillin, single colonies grown, and then plasmid DNA extracted using a standard minipreparation procedure. Next, a sample of the DNA minipreparation can be digested with a combination of the restriction enzymes SalI, NotI, XbaI and EcorV and the resultant products resolved on a 0.8% agarose gel using standard DNA electrophoresis conditions. The digest liberates fragments as follows:

[2344] Human TANGO 253 (clone EpT253): 1.3 kb

[2345] Human TANGO 257 (clone EpT257): 1.8 kb

[2346] Human INTERCEPT 258 (clone EpT258): 1.0 kb and 0.85 kb (human INTERCEPT 258 has a EcorV cut site at about bp 1004).

[2347] The identity of the strains can be inferred from the fragments liberated.

[2348] Clones containing cDNA molecules encoding mouse INTERCEPT 258 were deposited with the American Type Culture Collection (Manassas, Va.) on Apr. 21, 1999 as Accession Number 207221, as part of a composite deposit representing a mixture of five strains, each carrying one recombinant plasmid harboring a particular cDNA clone.

[2349] To distinguish the strains and isolate a strain harboring a particular cDNA clone, an aliquot of the mixture can be streaked out to single colonies on nutrient medium (e.g., LB plates) supplemented with 100 μg/ml ampicillin, single colonies grown, and then plasmid DNA extracted using a standard minipreparation procedure. Next, a sample of the DNA minipreparation can be digested with a combination of the restriction enzymes SalI, and NotI, and the resultant products resolved on a 0.8% agarose gel using standard DNA electrophoresis conditions. The digest liberates fragments as follows:

[2350] Mouse INTERCEPT 258 (clone EpT258): 1.8 kb

[2351] The identity of the strains can be inferred from the fragments liberated.

[2352] A clone containing a cDNA molecule encoding murine TANGO 253 (Clone EpTm 253) was deposited with American Type Culture Collection, 10801 University Boulevard, Manassas, Va. 20110-2209, on Apr. 21, 1999 as Accession Number 207215.

[2353] A clone containing a cDNA molecule encoding murine TANGO 257 (Clone EpTm 257) was deposited with American Type Culture Collection, 10801 University Boulevard, Manassas, Va. 20110-2209, on Apr. 21, 1999 as Accession Number 207217.

[2354] Clones containing cDNA molecules encoding human MANGO 003 were deposited with the American Type Culture Collection (ATCC® 10801 University Boulevard, Manassas, Va. 20110-2209) on Mar. 30, 1999 as Accession Number 207178, as part of a composite deposit representing a mixture of three strains, each carrying one recombinant plasmid harboring a particular cDNA clone.

[2355] To distinguish the strains and isolate a strain harboring a particular cDNA clone, an aliquot of the mixture can be streaked out to single colonies on nutrient medium (e.g., LB plates) supplemented with 100 g/ml ampicillin, single colonies grown, and then plasmid DNA extracted using a standard minipreparation procedure. Next, a sample of the DNA minipreparation can be digested with a combination of the restriction enzymes Sal I and Not I, and the resultant products resolved on a 0.8% agarose gel using standard DNA electrophoresis conditions. The digest liberates fragments as follows:

[2356] human MANGO 003 (clone EpthLa6a1): 3.2 kB

[2357] Clones containing cDNA molecules encoding human INTERCEPT 340, MANGO 347, and TANGO 272 were deposited with the American Type Culture Collection (ATCC® 10801 University Boulevard, Manassas, Va. 20110-2209) on Jun. 18, 1999 as Accession Number PTA-250, as part of a composite deposit representing a mixture of three strains, each carrying one recombinant plasmid harboring a particular cDNA clone.

[2358] To distinguish the strains and isolate a strain harboring a particular cDNA clone, an aliquot of the mixture can be streaked out to single colonies on nutrient medium (e.g., LB plates) supplemented with 100 g/ml ampicillin, single colonies grown, and then plasmid DNA extracted using a standard minipreparation procedure. Next, a sample of the DNA minipreparation can be digested with a combination of the restriction enzymes Sal I and Not I, and the resultant products resolved on a 0.8% agarose gel using standard DNA electrophoresis conditions. The digest liberates fragments as follows:

[2359] human INTERCEPT 340 (clone EpI340): 3.3 kB

[2360] human MANGO 347 (clone EpM347): 1.4 kB

[2361] human TANGO 272 (clone EpT272): 5.0 kB

[2362] The identity of the strains can be inferred from the fragments liberated.

[2363] Clones containing cDNA molecules encoding human TANGO 295, TANGO 354, and TANGO 378 were deposited with the American Type Culture Collection (ATCC® 10801 University Boulevard, Manassas, Va. 20110-2209) on Jun. 18, 1999 as Accession Number PTA-249, as part of a composite deposit representing a mixture of three strains, each carrying one recombinant plasmid harboring a particular cDNA clone.

[2364] To distinguish the strains and isolate a strain harboring a particular cDNA clone, an aliquot of the mixture can be streaked out to single colonies on nutrient medium (e.g., LB plates) supplemented with 100 g/ml ampicillin, single colonies grown, and then plasmid DNA extracted using a standard minipreparation procedure. Next, a sample of the DNA minipreparation can be digested with a combination of the restriction enzymes Sal I and Not I, and the resultant products resolved on a 0.8% agarose gel using standard DNA electrophoresis conditions. The digest liberates fragments as follows:

[2365] human TANGO 295 (clone EpT295): 1.5 kB

[2366] human TANGO 354 (clone EpT354): 1.8 kB

[2367] human TANGO 378 (clone EpT378): 3.3 kB

[2368] The identity of the strains can be inferred from the fragments liberated.

[2369] Clones containing cDNA molecules encoding TANGO 339 and TANGO 358 (clones EpT339 and EpT358, respectively), were deposited with the American Type Culture Collection (Manassas, Va.) on Jun. 29, 1999 as Accession Number PTA-292, as part of a composite deposit representing a mixture of three strains, each carrying one recombinant plasmid harboring a particular cDNA clone.

[2370] To distinguish the strains and isolate a strain harboring a particular cDNA clone, an aliquot of the mixture can be streaked out to single colonies on nutrient medium (e.g., LB plates) supplemented with 100 μg/ml ampicillin, single colonies grown, and then plasmid DNA extracted using a standard minipreparation procedure. Next, a sample of the DNA minipreparation can be digested with a combination of the restriction enzymes SalI and NotI and the resultant products resolved on a 0.8% agarose gel using standard DNA electrophoresis conditions. The digest liberates fragments as follows:

[2371] TANGO 339 (EpT339): 2.7 kb

[2372] TANGO 358 (EpT358): 1.6 kb

[2373] The identity of the strains can be inferred from the fragments liberated.

[2374] Clones containing cDNA molecules encoding MANGO 346, TANGO 365, and TANGO 368 (clones EpM346, EpT365, and EpT368, respectively), were deposited with the American Type Culture Collection (Manassas, Va.) on Jun. 29, 1999 as Accession Number PTA-291, as part of a composite deposit representing a mixture of three strains, each carrying one recombinant plasmid harboring a particular cDNA clone.

[2375] To distinguish the strains and isolate a strain harboring a particular cDNA clone, an aliquot of the mixture can be streaked out to single colonies on nutrient medium (e.g., LB plates) supplemented with 100 μg/ml ampicillin, single colonies grown, and then plasmid DNA extracted using a standard minipreparation procedure. Next, a sample of the DNA minipreparation can be digested with a combination of the restriction enzymes Sal I and Not I and the resultant products resolved on a 0.8% agarose gel using standard DNA electrophoresis conditions. The digest liberates fragments as follows:

[2376] MANGO 346 (EpM346): 1.2 kb

[2377] TANGO 365 (EpT365): 1.4 kb

[2378] TANGO 368 (EpT368): 1.0 kb

[2379] The identity of the strains can be inferred from the fragments liberated.

[2380] Clones containing cDNA molecules encoding MANGO 349, TANGO 369, and TANGO 383 (clones EpM349, EpT369, and EpT383, respectively), were deposited with the American Type Culture Collection (Manassas, Va.) on Jun. 29, 1999 as Accession Number PTA-295, as part of a composite deposit representing a mixture of four strains, each carrying one recombinant plasmid harboring a particular cDNA clone.

[2381] To distinguish the strains and isolate a strain harboring a particular cDNA clone, an aliquot of the mixture can be streaked out to single colonies on nutrient medium (e.g., LB plates) supplemented with 100 μg/ml ampicillin, single colonies grown, and then plasmid DNA extracted using a standard minipreparation procedure. Next, a sample of the DNA minipreparation can be digested with a combination of the restriction enzymes Sal I and Not I and the resultant products resolved on a 0.8% agarose gel using standard DNA electrophoresis conditions. The digest liberates fragments as follows:

[2382] MANGO 349 (EpM349): 3.7 kb

[2383] TANGO 369 (EpT369): 1.1 kb

[2384] TANGO 383 (EpT383): 1.4 kb

[2385] The identity of the strains can be inferred from the fragments liberated.

[2386] To distinguish the strains and isolate a strain harboring a particular cDNA clone, an 15 aliquot of the mixture can be streaked out to single colonies on nutrient medium (e.g., LB plates) supplemented with 100 μg/ml ampicillin, single colonies grown, and then plasmid DNA extracted using a standard minipreparation procedure. Next, a sample of the DNA minipreparation can be digested with a combination of the restriction enzymes Sal I and Not I and the resultant products resolved on a 0.8% agarose gel using standard DNA electrophoresis conditions. The digest liberates fragments as follows:

[2387] Clones containing cDNA molecules encoding MANGO 511 (clone 511), were deposited with the American Type Culture Collection (Manassas, Va.) on Jul. 23, 1999 as Accession Number PTA-425, as part of a composite deposit representing a mixture of three strains, each carrying one recombinant plasmid harboring a particular cDNA clone.

[2388] To distinguish the strains and isolate a strain harboring a particular cDNA clone, an aliquot of the mixture can be streaked out to single colonies on nutrient medium (e.g., LB plates) supplemented with 100 μg/ml ampicillin, single colonies grown, and then plasmid DNA extracted using a standard minipreparation procedure. Next, a sample of the DNA minipreparation can be digested with a combination of the restriction enzymes Sal I and Not and the resultant products resolved on a 0.8% agarose gel using standard DNA electrophoresis conditions. The digest liberates 1.5 kb fragments that correspond to MANGO 511 (511). The identity of the strain containing MANGO 511 can be inferred from the liberation of a fragment of the above identified size.

[2389] Clones containing cDNA molecules encoding INTERCEPT 307 and TANGO 361 (clones 307 and 361, respectively), were deposited with the American Type Culture Collection (Manassas, Va.) on Jul. 29, 1999 as Accession Number PTA-455, Accession Number PTA-438, and Accession Number PTA-438 respectively, as part of a composite deposit representing a mixture of five strains, each carrying one recombinant plasmid harboring a particular cDNA clone.

[2390] To distinguish the strains and isolate a strain harboring a particular cDNA clone, an aliquot of the mixture can be streaked out to single colonies on nutrient medium (e.g., LB plates) supplemented with 100 μg/ml ampicillin, single colonies grown, and then plasmid DNA extracted using a standard minipreparation procedure. Next, a sample of the DNA minipreparation can be digested with a combination of the restriction enzymes Sal I and Not I and the resultant products resolved on a 0.8% agarose gel using standard DNA electrophoresis conditions. The digest liberates fragments as follows:

[2391] INTERCEPT 307 (307): 2.0 kb

[2392] TANGO 361 (361): 5.1 kb

[2393] The identity of the strains can be inferred from the fragments liberated.

[2394] Clones containing cDNA molecules encoding TANGO 499 form 1, variant 1 (clone EpT499 form 1, variant 1), were deposited with the American Type Culture Collection (Manassas, Va.) on Aug. 5, 1999 as Accession Number PTA-455, as part of a composite deposit representing a mixture of three strains, each carrying one recombinant plasmid harboring a particular cDNA clone.

[2395] To distinguish the strains and isolate a strain harboring a particular cDNA clone, an aliquot of the mixture can be streaked out to single colonies on nutrient medium (e.g., LB plates) supplemented with 100 μg/ml ampicillin, single colonies grown, and then plasmid DNA extracted using a standard minipreparation procedure. Next, a sample of the DNA minipreparation can be digested with a combination of the restriction enzymes Sal I and Not I and the resultant products resolved on a 0.8% agarose gel using standard DNA electrophoresis conditions. The digest liberates 1.1 kb fragments that correspond to TANGO 499 form 1, variant 1 (EpT499 form 1, variant 1). The identity of the strain containing TANGO 499 form 1, variant 1 can be inferred from the liberation of a fragment of the above identified size.

[2396] Clones containing cDNA molecules encoding TANGO 499 form 2, variant 3 (clone EpT499 form 2, variant 3), were deposited with the American Type Culture Collection (Manassas, Va.) on Aug. 5, 1999 as Accession Number PTA-454, as part of a composite deposit representing a mixture of four strains, each carrying one recombinant plasmid harboring a particular cDNA clone.

[2397] To distinguish the strains and isolate a strain harboring a particular cDNA clone, an aliquot of the mixture can be streaked out to single colonies on nutrient medium (e.g., LB plates) supplemented with 100 gg/ml ampicillin, single colonies grown, and then plasmid DNA extracted using a standard minipreparation procedure. Next, a sample of the DNA minipreparation can be digested with a combination of the restriction enzymes Sal I and Not I and the resultant products resolved on a 0.8% agarose gel using standard DNA electrophoresis conditions. The digest liberates 1.1 kb fragments that correspond to TANGO 499 form 2, variant 3 (EpT499 form 2, variant 3). The identity of the strain containing TANGO 499 form 2, variant 3 can be inferred from the liberation of a fragment of the above identified size.

[2398] Clones containing cDNA molecules encoding human TANGO 315, TANGO 330 form a, TANGO 330 form b, TANGO 437, and TANGO 480 (clones EpT315, 330a, 330b, 437 and 480, respectively) were deposited with the American Type Culture Collection (Manassas, Va.) on Oct. 1, 1999 as PTA-816, as part of a composite deposit representing a mixture of five strains, each carrying one recombinant plasmid harboring a particular cDNA clone.

[2399] To distinguish the strains and isolate a strain harboring a particular cDNA clone, an aliquot of the mixture can be streaked out to single colonies on nutrient medium (e.g., LB plates) supplemented with 100 μg/ml ampicillin, single colonies grown, and then plasmid DNA extracted using a standard minipreparation procedure. Next, a sample of the DNA minipreparation can be digested with a combination of the restriction enzymes SalI and NotI, and the resultant products resolved on a 0.8% agarose gel using standard DNA electrophoresis conditions. The digest liberates fragments as follows:

[2400] 1. human TANGO 315 (clone EpT315): 1.4 kb

[2401] 2. human TANGO 330 form 1 (clone 330a): 3.0 kb

[2402] 3. human TANGO 330 form 2 (clone 330b): 3.8 kb

[2403] 4. human TANGO 437 (clone 437): 4.3 kb

[2404] 5. human TANGO 480 (clone 480): 1.9 kb

[2405] The identity of each of the strains can be inferred from the DNA fragments liberated.

[2406] All publications, patents and patent applications mentioned in this specification are herein incorporated by reference into the specification to the same extent as if each individual publication, patent or patent application was specifically and individually indicated to be incorporated herein by reference.

[2407] Equivalents

[2408] Those skilled in the art will recognize, or be able to ascertain using no more than routine experimentation, many equivalents to the specific embodiments of the invention described herein. Such equivalents are intended to be encompassed by the following claims.

The application's sequence listing, which the Patent Office published only in electronic form, follows.

SEQUENCE LISTING (162 sequences)

SEQ ID NO: 1 - DNA, 1813 bp, Mus musculus
  CDS (89)...(1813)
gaattcggcacgagacccggcgaggagcttcctgccaggtagacaagaggcgccccgggaccctgccggcacccctgttcaacccaggatgctatcggccctccctcttcttttcctcctcctcggaggtgctctggcccgcccagaccggatcactttcccacgttctgcttgtgaggcgcccccagcagtgctctcagaagtacaaggcactttacagaggcctctaggccgggacagccgaagctcccctgccaactgcacctgggttatcctgggcagcaaggatcagacagtaactgtcaggttccagaagctgcatctggcctgtggctcagagcatttaatcctgcactcccctctacagccaccaatctccctgtgtgaggccccttctggccctttgcagctaccagggggcaatgtcaccattacatacagctatgctggggccagagcacccatgggccagggcttcttgctgacttacagtcaagattggctactgtgcctgcaagaagaattccagtgcctgaaccaccgctgcattccagctgctcagcgctgtgatgggattgatgcctgcggggatggctcagacgaggcaggctgcagctcagatccattccctaacctgaacccagcccccgcaccaactctggcctgcaatctcaccttggaggacttttatggggtcttttcttcccctggatattcacacctggcctcagtctcccacccccagtcctgcctgtggctgctggacccccatgatggccggaggctggcagtgcgcttcacagccctggacttgagttacggagatgcagtgcatgtgtatgatggtgctggaccccccgagacccctcgactgctacgtagcctcacccacttcagcaatggcaaggctgtcactgtggagaccctgtctggtcaggctgttgtgtcctaccacacagttgcttggagcagtggccggggctttaatgctacctaccatgtccggggctactgtttaccttgggacagaccctgtggcttgggctctggcctgggggctagtgagaacctaggtgagcgttgctatagcgaggcacagcgctgtgatggctcatgggactgtgccgatggcacagatgaggagggttgccctggctgcccaccagggcacttcccctgtggagctgcaggcacccctggtgccacagcctgctacctgcctgctgaccgctgcaactaccagacgttctgcgccgatggagcggatgagaggcgctgccggcattgccagcccggcaacttccggtgccgggatgagaagtgtgtgtatgagacatgggtgtgtgatgggcagccagactgtactgacggcagtgatgagtgggactgctcctacgccctgccccgaaaagtcatcacagcagcagtcattggcagcctggtgtgtggcctgttgctggtcatcgctctcggctgcacctgcaaactctatgccatccgcacccaggaatacagcatgtttgccccgctctgccggatggaggctgagattgtgcagcaacaggcacccccttcctatgggcagctcattgcccagggtgccatcccgcctgtggaagacttccccacagagaaccctaacgataactctgtgctgggaaacctacgttctctgcttcagatcttacgccaggatatgactccaggtggcacttcagggggccgccgtcgccagcgtggacgctccgtccgccgtctggttcgccgtctccgtcgttggggcctgcttcctcgaactaataccctgctcgag

SEQ ID NO: 2 - protein, 575 aa, Mus musculus
MLSALPLLFLLLGGALARPDRITFPRSACEAPPAVLSEVQGTLQRPLGRDSRSSPANCTWVILGSKDQTVTVRFQKLHLACGSEHLILHSPLQPPISLCEAPSGPLQLPGGNVTITYSYAGARAPMGQGFLLTYSQDWLLCLQEEFQCLNHRCIPAAQRCDGIDACGDGSDEAGCSSDPFPNLNPAPAPTLACNLTLEDFYGVFSSPGYSHLASVSHPQSCLWLLDPHDGRRLAVRFTALDLSYGDAVHVYDGAGPPETPRLLRSLTHFSNGKAVTVETLSGQAVVSYHTVAWSSGRGFNATYHVRGYCLPWDRPCGLGSGLGASENLGERCYSEAQRCDGSWDCADGTDEEGCPGCPPGHFPCGAAGTPGATACYLPADRCNYQTFCADGADERRCRHCQPGNFRCRDEKCVYETWVCDGQPDCTDGSDEWDCSYALPRKVITAAVIGSLVCGLLLVIALGCTCKLYAIRTQEYSMFAPLCRMEAEIVQQQAPPSYGQLIAQGAIPPVEDFPTENPNDNSVLGNLRSLLQILRQDMTPGGTSGGRRRQRGRSVRRLVRRLRRWGLLPRTNTLLE

SEQ ID NO: 3 - DNA, 3017 bp, Homo sapiens
  CDS (541)...(2679)
gtcgacccacgcgtccgcgcctgggcaagggccggggcgccgggccgagccacctcttcccctcccccgcttccctgtcgcgctccgctggctggacgcgctggaggagtggagcagcacccggccggccctgggggctgacagtcggcaaagtttggcccgaagaggaagtggtctcaaaccccggcaggtggcgaccaggccagaccaggggcgctcgctgcctgcgggcgggctgtaggcgagggcgcgccccagtgccgagacccggggcttcaggagccggccccgggagagaagagtgcggcggcggacggagaaaacaactccaaagttggcgaaaggcaccgcccctactcccgggctgccgccgcctccccgcccccagccctggcatccagagtacgggtcgagcccgggccatggagcccccctggggaggcggcaccagggagcctgggcgcccggggctccgccgcgaccccatcgggtagaccacagaagctccgggacccttccggcacctctggacagcccaggatgctgttggccaccctcctcctcctcctccttggaggcgctctggcccatccagaccggattatttttccaaatcatgcttgtgaggaccccccagcagtgctcttagaagtgcagggcaccttacagaggcccctggtccgggacagccgcacctcccctgccaactgcacctggctcatcctgggcagcaaggaacagactgtcaccatcaggttccagaagctacacctggcctgtggctcagagcgcttaaccctacgctcccctctccagccactgatctccctgtgtgaggcacctcccagccctctgcagctgcccgggggcaacgtcaccatcacttacagctatgctggggccagagcacccatgggccagggcttcctgctctcctacagccaagattggctgatgtgcctgcaggaagagtttcagtgcctgaaccaccgctgtgtatctgctgtccagcgctgtgatggggttgatgcctgtggcgatggctctgatgaagcaggttgcagctcagaccccttccctggcctgaccccaagacccgtcccctccctgccttgcaatgtcaccttggaggacttctatggggtcttctcctctcctggatatacacacctagcctcagtctcccacccccagtcctgccattggctgctggacccccatgatggccggcggctggccgtgcgcttcacagccctggacttgggctttggagatgcagtgcatgtgtatgacggccctgggccccctgagagctcccgactactgcgtagtctcacccacttcagcaatggcaaggctgtcactgtggagacactgtctggccaggctgttgtgtcctaccacacagttgcttggagcaatggtcgtggcttcaatgccacctaccatgtgcggggctattgcttgccttgggacagaccctgtggcttaggctctggcctgggagctggcgaaggcctaggtgagcgctgctacagtgaggcacagcgctgtgacggctcatgggactgtgctgacggcacagatgaggaggactgcccaggctgcccacctggacacttcccctgtggggctgctggcacctctggtgccacagcctgctacctgcctgctgaccgctgcaactaccagactttctgtgctgatggagcagatgagagacgctgtcggcattgccagcctggcaatttccgatgccgggacgagaagtgcgtgtatgagacgtgggtgtgcgatgggcagccagactgtgcggacggcagtgatgagtgggactgctcctatgttctgccccgcaaggtcattacagctgcagtcattggcagcctagtgtgcggcctgctcctggtcatcgccctgggctgcacctgcaagctctatgccattcgcacccaggagtacagcatctttgcccccctctcccggatggaggctgagattgtgcagcagcaggcacccccttcctacgggcagctcattgcccagggtgccatcccacctgtagaagactttcctacagagaatcctaatgataactcagtgctgggcaacctgcgttctctgctacagatcttacgccaggatatgactccaggaggtggcccaggtgcccgccgtcgtcagcggggccgcttgatgcgacgcctggtacgccgtctccgccgctggggcttgctccctcgaaccaacaccccggctcgggcctctgaggccagatcccaggtcacaccttctgctgctccccttgaggccctagatggtggcacaggtccagcccgtgagggcggggcagtgggtgggcaagatggggagcaggcacccccactgcccatcaaggctcccctcccatctgctagcacgtctccagcccccactactgtccctgaagccccagggccactgccctcactgcccctagagccatcactattgtctggagtggtgcaggccctgcgaggccgcctgttgcccagcctggggcccccaggaccaacccggagcccccctggaccccacacagcagtcctggccctggaagatgaggacgatgtgctactggtgccactggctgagccgggggtgtgggtagctgaggcagaggatgagccactgcttacctgaggggacctgggggctctactgaggcctctcccctgggggctctactcatagtggcacaaccttttagaggtgggtcagcctcccctccaccacttccttccctgtccctggatttcagggacttggtgggcctcccgttgaccctatgtagctgctataaagttaagtgtccctcaggcagggagagggctcacagagtctcctctgtacgtggccatggccagacaccccagtcccttcaccaccacctgctccccacgccaccaccatttgggtggctgtttttaaaaagtaaagttcttagaggataaaaaaaaaaaaaaaagggcggccgc

SEQ ID NO: 4 - protein, 713 aa, Homo sapiens
MLLATLLLLLLGGALAHPDRIIFPNHACEDPPAVLLEVQGTLQRPLVRDSRTSPANCTWLILGSKEQTVTIRFQKLHLACGSERLTLRSPLQPLISLCEAPPSPLQLPGGNVTITYSYAGARAPMGQGFLLSYSQDWLMCLQEEFQCLNHRCVSAVQRCDGVDACGDGSDEAGCSSDPFPGLTPRPVPSLPCNVTLEDFYGVFSSPGYTHLASVSHPQSCHWLLDPHDGRRLAVRFTALDLGFGDAVHVYDGPGPPESSRLLRSLTHFSNGKAVTVETLSGQAVVSYHTVAWSNGRGFNATYHVRGYCLPWDRPCGLGSGLGAGEGLGERCYSEAQRCDGSWDCADGTDEEDCPGCPPGHFPCGAAGTSGATACYLPADRCNYQTFCADGADERRCRHCQPGNFRCRDEKCVYETWVCDGQPDCADGSDEWDCSYVLPRKVITAAVIGSLVCGLLLVIALGCTCKLYAIRTQEYSIFAPLSRMEAEIVQQQAPPSYGQLIAQGAIPPVEDFPTENPNDNSVLGNLRSLLQILRQDMTPGGGPGARRRQRGRLMRRLVRRLRRWGLLPRTNTPARASEARSQVTPSAAPLEALDGGTGPAREGGAVGGQDGEQAPPLPIKAPLPSASTSPAPTTVPEAPGPLPSLPLEPSLLSGVVQALRGRLLPSLGPPGPTRSPPGPHTAVLALEDEDDVLLVPLAEPGVWVAEAEDEPLLT

SEQ ID NO: 5 - DNA, 2839 bp, Homo sapiens
  CDS (288)...(1322)
gtcgacccacgcgtccggccacagctcaggatttgtttaaaccttgggaaactggttcaggtccaggttttgctttgatccttttcaaaaactggagacacagaagagggctctaggaaaaagttttggatgggattatgtggaaactaccctgcgattctctgctgccagagcaggctcggcgcttccaccccagtgcagccttcccctggcggtggtgaaagagactcgggagtcgctgcttccaaagtgcccgccgtgagtgagctctcaccccagtcagccaaatgagcctcttcgggcttctcctgctgacatctgccctggccggccagagacaggggactcaggcggaatccaacctgagtagtaaattccagttttccagcaacaaggaacagaacggagtacaagatcctcagcatgagagaattattactgtgtctactaatggaagtattcacagcccaaggtttcctcatacttatccaagaaatacggtcttggtatggagattagtagcagtagaggaaaatgtatggatacaacttacgtttgatgaaagatttgggcttgaagacccagaagatgacatatgcaagtatgattttgtagaagttgaggaacccagtgatggaactatattagggcgctggtgtggttctggtactgtaccaggaaaacagatttctaaaggaaatcaaattaggataagatttgtatctgatgaatattttccttctgaaccagggttctgcatccactacaacattgtcatgccacaattcacagaagctgtgagtccttcagtgctacccccttcagctttgccactggacctgcttaataatgctataactgcctttagtaccttggaagaccttattcgatatcttgaaccagagagatggcagttggacttagaagatctatataggccaacttggcaacttcttggcaaggcttttgtttttggaagaaaatccagagtggtggatctgaaccttctaacagaggaggtaagattatacagctgcacacctcgtaacttctcagtgtccataagggaagaactaaagagaaccgataccattttctggccaggttgtctcctggttaaacgctgtggtgggaactgtgcctgttgtctccacaattgcaatgaatgtcaatgtgtcccaagcaaagttactaaaaaataccacgaggtccttcagttgagaccaaagaccggtgtcaggggattgcacaaatcactcaccgacgtggccctggagcaccatgaggagtgtgactgtgtgtgcagagggagcacaggaggatagccgcatcaccaccagcagctcttgcccagagctgtgcagtgcagtggctgattctattagagaacgtatgcgttatctccatccttaatctcagttgtttgcttcaaggacctttcatcttcaggatttacagtgcattctgaaagaggagacatcaaacagaattaggagttgtgcaacagctcttttgagaggaggcctaaaggacaggagaaaaggtcttcaatcgtggaaagaaaattaaatgttgtattaaatagatcaccagctagtttcagagttaccatgtacgtattccactagctgggttctgtatttcagttctttcgatacggcttagggtaatgtcagtacaggaaaaaaactgtgcaagtgagcacctgattccgttgccttgcttaactctaaagctccatgtcctgggcctaaaatcgtataaaatctggatttttttttttttttttgctcatattcacatatgtaaaccagaacattctatgtactacaaacctggtttttaaaaaggaactatgttgctatgaattaaacttgtgtcgtgctgataggacagactggatttttcatatttcttattaaaatttctgccatttagaagaagagaactacattcatggtttggaagagataaacctgaaaagaagagtggccttatcttcactttatcgataagtcagtttatttgtttcattgtgtacatttttatattctccttttgacattataactgttggcttttctaatcttgttaaatatatctatttttaccaaaggtatttaatattcttttttatgacaacttagatcaactatttttagcttggtaaatttttctaaacacaattgttatagccagaggaacaaagatgatataaaatattgttgctctgacaaaaatacatgtatttcattctcgtatggtgctagagttagattaatctgcattttaaaaaactgaattggaatagaattggtaagttgcaaagactttttgaaaataattaaattatcatatcttccattcctgttattggagatgaaaataaaaagcaacttatgaaagtagacattcagatccagccattactaacctattccttttttggggaaatctgagcctagctcagaaaaacataaagcaccttgaaaaagacttggcagcttcctgataaagcgtgctgtgctgtgcagtaggaacacatcctatttattgtgatgttgtggttttattatcttaaactctgttccatacacttgtataaatacatggatatttttatgtacagaagtatgtctcttaaccagttcacttattgtactctggcaatttaaaagaaaatcagtaaaatattttgcttgtaaaatgcttaatatcgtgcctaggttatgtggtgactatttgaatcaaaaatgtattgaatcatcaaataaaagaatgtggctattttggggagaaaaaaaaaaaaaaaaaaaaaaaaaaaaaaaagggcggccgc

SEQ ID NO: 6 - protein, 345 aa, Homo sapiens
MSLFGLLLLTSALAGQRQGTQAESNLSSKFQFSSNKEQNGVQDPQHERIITVSTNGSIHSPRFPHTYPRNTVLVWRLVAVEENVWIQLTFDERFGLEDPEDDICKYDFVEVEEPSDGTILGRWCGSGTVPGKQISKGNQIRIRFVSDEYFPSEPGFCIHYNIVMPQFTEAVSPSVLPPSALPLDLLNNAITAFSTLEDLIRYLEPERWQLDLEDLYRPTWQLLGKAFVFGRKSRVVDLNLLTEEVRLYSCTPRNFSVSIREELKRTDTIFWPGCLLVKRCGGNCACCLHNCNECQCVPSKVTKKYHEVLQLRPKTGVRGLHKSLTDVALEHHEECDCVCRGSTGG

SEQ ID NO: 7 - DNA, 1550 bp, Homo sapiens
  CDS (2)...(619)
ggaatttcatatactccttcccaccatggattgccaagaaaatgagtactgggaccaatggggacggtgtgtcacctgccaacggtgtggtcctggacaggagctatccaaggattgtggttatggagagggtggagatgcctactgcacagcctgccctcctcgcaggtacaaaagcagctggggccaccacaaatgtcagagttgcatcacctgtgctgtcatcaatcgtgttcagaaggtcaactgcacagctacctctaatgctgtctgtggggactgtttgcccaggttctaccgaaagacacgcattggaggcctgcaggaccaagagtgcatcccgtgcacgaagcagacccccacctctgaggttcaatgtgccttccagttgagcttagtggaggcagatgcacccacagtgccccctcaggaggccacacttgttgcactggtgagcagcctgctagtggtgtttaccctggccttcctggggctcttcttcctctactgcaagcagttcttcaacagacattgccagcgtggtaagggtggctgtttcatgtttcacatgaatcaggaacaaggctcttattggcagaagagagggatgttctggggttgagagacaatgggccttttctaccatgcttgaaaaccccatgaatagtcttctgttggcctggggaactatctggggctgcaatggaaagcatgggacttaagagattactgaagccaaccctgagagtttagaagacctggttcattatgtttcaggggattttaaaggaatgtggcacggtgggaaacccctcaggaaaggaatcgggagacctaggttctatgtctacctctaaatcaccgtgtaaccttagacaagtcatctagcctcttcagacctctttcttcctaatctttaagataagagataggattggatttgttgatttctgggttcttttccaattctttatatctatactagtaggtataaattctagagcatgtcatgaattgaggaaggcttggctatatctgagatacgactgtaataaaagtggttgaggtctaaggccactgctatcagtataataacttcacaaatggggataactgaaagccctatgtccagagtagttggcaaacctggactttctccctcagataatactgatgtcaagaggtctagcccagtccatatcagacagccatgcaaaattccagatggaaaatcatatttaaagtcacagtaacattgtgatctctattaagcacaacttcagctactagacaagaatgtgggacagaaaagccagctcactgaggacaaagatgggggaggtgggaatgtggctgatcaggaccaggcaaagagttagaactccagccaagagtaccaaggttcagtgcagcttcattgccattaagggaactgagagttaggcagggacactgaaacaggaactcagatcagagaatgaagttgatttataagggggaaaaaaaaaaaaaaaaaaaaaaaaaaaaaaaaaaaaaaaaagggcggccgc

SEQ ID NO: 8 - protein, 206 aa, Homo sapiens
EFHILLPTMDCQENEYWDQWGRCVTCQRCGPGQELSKDCGYGEGGDAYCTACPPRRYKSSWGHHKCQSCITCAVINRVQKVNCTATSNAVCGDCLPRFYRKTRIGGLQDQECIPCTKQTPTSEVQCAFQLSLVEADAPTVPPQEATLVALVSSLLVVFTLAFLGLFFLYCKQFFNRHCQRGKGGCFMFHMNQEQGSYWQKRGMFWG

SEQ ID NO: 9 - DNA, 3385 bp, Homo sapiens
  CDS (1)...(591)
ggatttgtaccggagtcccatttgggagcaagagccatctactcgtccgttaccggccttcccaccatggattgccaagaaaatgagtactgggaccaatggggacggtgtgtcacctgccaacggtgtggtcctggacaggagctatccaaggattgtggttatggagagggtggagatgcctactgcacagcctgccctcctcgcaggtacaaaagcagctggggccaccacaaatgtcagagttgcatcacctgtgctgtcatcaatcgtgttcagaaggtcaactgcacagctacctctaatgctgtctgtggggactgtttgcccaggttctaccgaaagacacgcattggaggcctgcaggaccaagagtgcatcccgtgcacgaagcagacccccacctctgaggttcaatgtgccttccagttgagcttagtggaggcagatgcacccacagtgccccctcaggaggccacacttgttgcactgttgcaggaggtttgctgcagtttgaggctgataaaacagcaaaggaggaatctctcttccccgtgccacccagcaaggagaccagtgctgagtcccaagtgagtgagaacatctttcagacccagccacttaaccctatcctcgaggacgactgcagctcgactagtggcttccccacacaggagtcctttaccatggcctcctgcacctcagagagccactcccactgggtccacagccccatcgaatgcacagagctggacctgcaaaagttttccagctctgcctcctatactggagctgagaccttggggggaaacacagtcgaaagcactggagacaggctggagctcaatgtgccctttgaagttcccagcccttaactctaatgaggtctcttgggcccctggcagccttgcccagttgttctctctggactctgttcctataccacaacagcagcaggggcctgaaatgtgatgtccacaagagctaataccctacagatggggcatatcctatcccatcccaccagaggattgattctccatttcacaaggactgatctggagcatttcttgcttccctgttgtagtctggggagccagattccacattcatgggactaccagacatgttcctagctcaacttgattatagagaagaggagagaggacagtgaatggggtagggttttcatgtctgcatttttggtcaggtaagcctctcaaaattgtgttggcacatctacctagcactttagggacaaaatcaaacccttctccccttttagctcctccacactgcctccctcctcaacacacacacacacacatacacacacatatacatagacacacaaacacacacacacacattaatatctatcttgggggaggcctcgtgccataattcccaagttcatgtctcagactgctgcattgcagcatgaggcagggcaaacactttccctctagatccctggggcctcaccctgtatttgaggttctcaccaccctcagcagggagaagggctgaagttcgccattttggaaccttacagaacatttctgagccaaagtaatcttccttctggggcctgagttccccaaactaccccacagcagtccctcaaagacagccctcaatccatgtagggacatctgagtatgcctctttctattgaaatgtcaattcaatcccagctttctcaccaccgttcccctttgattctttctcaattgtctttttgcctttagctcccacctatacatctcatgctcagagaaaaacaagttccttagaggttgtattctttattctccaagaatctgtctgaaacttgtacagctagttcctgtcccacaactattaagtggtttattaagtacattaggcagaatgtgcacttcatcaccaggttctagctctggcaaaggagtgctgtctacagcaagatttttgcttttagaattttattaactacatcttttgggttcatccatctacaaacactgattaagggcccctggggcaaccaattgatcagattactaaaaggacttgggaaaaagcaaaaaggtcccattgtactggactgaggattagaagcaattgaaatacaagcctgtaccaagcaagcagcctggccccacacaggtattagcaaatatgtggtaaccaaggttttaggccttggcctttaggtttcctgttttttttttgtttttgtttttgtttttgtttttctgcaacaggttattcttatctcactggctttcactgatcatgtttagaccttctggtagaagaaataatatccagacaggggatgatttggcttcagcaggctgcaggtgttcaaaggttgccatgtggctggcagtggttcaagcccacatttgacactgctgctctagaggaaagataatgatggtaacacagtaataataataataataacaaaaatatgataaagtgaaagagtaagacttcttcagtgtgcttgctcatggcatgaatgctatgtggacagcccaagccatacccagaatcaccttaattccaactttttgaggttcagcaattggaggtggcaattggctttgcattttaaagtatttcgggtaaaggtgaagtgaaggattttcgtctttataatttctgtttggccatggcaaataccatagttgagtatttgcttcaggagagttctttttacagttttacttttcaatgctgaggcatatttctttgagcactgtgcttttatgtgtctttctacaaaggggttattggtcagtggaagaacaaagtacacttgataaaaacattttcaacatacattgagcctaaacagcagttaagttgtctctaaatgaactagcaaaaaaaaaaaatgtagtttttgtttgtaaggaaggggaggtatttcctgagaatgaattttttttttttttggattactgtttttctctccatataccttgacttggattttgacaggagggagtctgggaaaataattttttcctccaagattctcagatccaggttaggaaaggattcagcactacagcatacccctctacaacatacagccctgtcacattgagatcataatccctcctgtcccactcctctctaccaaccccaccctactagctaggtcttcagtgttttacattgaatattggtacattttaattattttttctcataaatgggttatttatagagattttgttaactcttgagccatatgcatgtgtagatactggcagggctatgtttgtttatgatgctctgcaaacatttcatattggccaataaacagaaatatatccaaaaaaaaaaaaaaaaaaaaaaaaaaaaaaaaaaaaagggcggccgc

SEQ ID NO: 10 - protein, 197 aa, Homo sapiens
GFVPESHLGARAIYSSVTGLPTMDCQENEYWDQWGRCVTCQRCGPGQELSKDCGYGEGGDAYCTACPPRRYKSSWGHHKCQSCITCAVINRVQKVNCTATSNAVCGDCLPRFYRKTRIGGLQDQECIPCTKQTPTSEVQCAFQLSLVEADAPTVPPQEATLVALLQEVCCSLRLIKQQRRNLSSPCHPARRPVLSPK

SEQ ID NO: 11 - DNA, 2272 bp, Homo sapiens
  CDS (213)...(1211)
gtcgacccacgcgtcctcgacgcgtgggcggagcggaaaccagaggggaaaccttgaactcctccagacaattgcttccggggagttgcgagggagcgagggggaataaaggacccgcgaggaagggcccgcggatggcgcgtccctgagggtcgtggcgagttcgcggagcgtgggaaggagcggaccctgctctccccgggctgcgggccatggccacggcggagcggagagccctcggcatcggcttccagtggctctctttggccactctggtgctcatctgcgccgggcaagggggacgcagggaggatgggggtccagcctgctacggcggatttgacctgtacttcattttggacaaatcaggaagtgtgctgcaccactggaatgaaatctattactttgtggaacagttggctcacaaattcatcagcccacagttgagaatgtcctttattgttttctccacccgaggaacaaccttaatgaaactgacagaagacagagaacaaatccgtcaaggcctagaagaactccagaaagttctgccaggaggagacacttacatgcatgaaggatttgaaagggccagtgagcagatttattatgaaaacagacaagggtacaggacagccagcgtcatcattgctttgactgatggagaactccatgaagatctctttttctattcagagagggaggctaataggtctcgagatcttggtgcaattgtttactgtgttggtgtgaaagatttcaatgagacacagctggcccggattgcggacagtaaggatcatgtgtttcccgtgaatgacggctttcaggctctgcaaggcatcatccactcaattttgaagaagtcctgcatcgaaattctagcagctgaaccatccaccatatgtgcaggagagtcatttcaagttgtcgtgagaggaaacggcttccgacatgcccgcaacgtggacagggtcctctgcagcttcaagatcaatgactcggtcacactcaatgagaagcccttttctgtggaagatacttatttactgtgtccagcgcctatcttaaaagaagttggcatgaaagctgcactccaggtcagcatgaacgatggcctctcttttatctccagttctgtcatcatcaccaccacacactgtagcctccacaaaattgcatcaggccccacaacagctgcttgcatggaatagcagagaataccgcctgctccctccggacagcacactcctgaaaacggggagagaggagccaaacatgctcggtttacactttccttatttactgaatgagtggagggcagagacaggcctggagttacgcacactgagtgccccaacatggaaagaaacatcaggagggacaggaaacgttccctccttaaccaacagttttcaagaccttactggaggcactttattggctacataatcactccatgcggtgggcatcaggcagaatcctggtgcagacccaactttgaggtggaggatttcacagtttctttattttgaacttcccccaggctcccactaattcctctccattctatcctcctccctttcccacaaaagaaaacagaaaggagcagcagtgtttgataccgtatcatccagaggcctggttctctcccattatagggcaaacaagccctggcaagatatttcactcccgccccatgccatgcattaaaaatccaaaattgcctatattccacctgccaagcaagagatgctttcattattgaagttccaaatgtatacctttgagaacagtgccttctcgtcttaaaagagaggtcctcattttgtgagttgggagcagagggaattaaagaaagccatgatgcagggatttggccattcaagccgggcagccttcagagaatgtcatccctaatgacacatgcccgaatgaaggagcggggctgagcttgtcctgccttcgtattgaatgttgcctgtctgcctccttaatagcgggcctctgtgtgagcatttgacaagacttaaaactattcattgaagaaaatggatgatcccccaacaggaagatgcaaccccatgggctgcctgcttgaccacagaagtgcttccagctccagttgctcatctgagaactccccccaccacttgctgttaaaattgttaaaattaaaggccatgttgattgattttttaaaaaaaaaaaaaaaaaaaaaaaaaaaaaaaaaaaaaaaaaaaaaaaaaaaaaaaaaaaaaggggcggccgc

SEQ ID NO: 12 - protein, 333 aa, Homo sapiens
MATAERRALGIGFQWLSLATLVLICAGQGGRREDGGPACYGGFDLYFILDKSGSVLHHWNEIYYFVEQLAHKFISPQLRMSFIVFSTRGTTLMKLTEDREQIRQGLEELQKVLPGGDTYMHEGFERASEQIYYENRQGYRTASVIIALTDGELHEDLFFYSEREANRSRDLGAIVYCVGVKDFNETQLARIADSKDHVFPVNDGFQALQGIIHSILKKSCIEILAAEPSTICAGESFQVVVRGNGFRHARNVDRVLCSFKINDSVTLNEKPFSVEDTYLLCPAPILKEVGMKAALQVSMNDGLSFISSSVIITTTHCSLHKIASGPTTAACME

SEQ ID NO: 13 - DNA, 2435 bp, Homo sapiens
  CDS (269)...(1927)
gtcgacccacgcgtccgtccagcttcatccgcagaggagcctcggccaggcttgccagggcgcccccagcccctccccaggccgcgagcgcccctgccgcggtgcctggcctccccgcccagactgcagggacagcacccggtaactgcgagtggagcggaggacccgagcggctgaggagagaggaggcggcggcttagctgctacggggtccggccggcgccctcccgaggggggctcaggaggaggaaggaggacccgtgcgagaatgcctctgccctggagccttgcgctcccgctgctgctctcctgggtggcaggtggtttcgggaacgcggccagtgcaaggcatcacgggttgttagcatcggcacgtcagcctggggtctgtcactatggaactaaactggcctgctgctacggctggagaagaaacagcaagggagtctgtgaagctacatgcgaacctggatgtaagtttggtgagtgcgtgggaccaaacaaatgcagatgctttccaggatacaccgggaaaacctgcagtcaagatgtgaatgagtgtggaatgaaaccccggccatgccaacacagatgtgtgaatacacacggaagctacaagtgcttttgcctcagtggccacatgctcatgccagatgctacgtgtgtgaactctaggacatgtgccatgataaactgtcagtacagctgtgaagacacagaagaagggccacagtgcctgtgtccatcctcaggactccgcctggccccaaatggaagagactgtctagatattgatgaatgtgcctctggtaaagtcatctgtccctacaatcgaagatgtgtgaacacatttggaagctactactgcaaatgtcacattggtttcgaactgcaatatatcagtggacgatatgactgtatagatataaatgaatgtactatggatagccatacgtgcagccaccatgccaattgcttcaatacccaagggtccttcaagtgtaaatgcaagcagggatataaaggcaatggacttcggtgttctgctatccctgaaaattctgtgaaggaagtcctcagagcacctggtaccatcaaagacagaatcaagaagttgcttgctcacaaaaacagcatgaaaaagaaggcaaaaattaaaaatgttaccccagaacccaccaggactcctacccctaaggtgaacttgcagcccttcaactatgaagagatagtttccagaggcgggaactctcatggaggtaaaaaagggaatgaagagaaaatgaaagaggggcttgaggatgagaaaagagaagagaaagccctgaagaatgacatagaggagcgaagcctgcgaggagatgtgtttttccctaaggtgaatgaagcaggtgaattcggcctgattctggtccaaaggaaagcgctaacttccaaactggaacataaagatttaaatatctcggttgactgcagcttcaatcatgggatctgtgactggaaacaggatagagaagatgattttgactggaatcctgctgatcgagataatgctattggcttctatatggcagttccggccttggcaggtcacaagaaagacattggccgattgaaacttctcctacctgacctgcaaccccaaagcaacttctgtttgctctttgattaccggctggccggagacaaagtcgggaaacttcgagtgtttgtgaaaaacagtaacaatgccctggcatgggagaagaccacgagtgaggatgaaaagtggaagacagggaaaattcagttgtatcaaggaactgatgctaccaaaagcatcatttttgaagcagaacgtggcaagggcaaaaccggcgaaatcgcagtggatggcgtcttgcttgtttcaggcttatgtccagatagccttttatctgtggatgactgaatgttactatctttatatttgactttgtatgtcagttccctggtttttttgatattgcatcataggacctctggcattttagaattactagctgaaaaattgtaatgtaccaacagaaatattattgtaagatgcctttcttgtataagatatgccaatatttgctttaaatatcatatcactgtatcttctcagtcatttctgaatctttccacattatattataaaatatggaaatgtcagtttatctcccctcctcagtatatctgatttgtataagtaagttgatgagcttctctctacaacatttctagaaaatagaaaaaaaagcacagagaaatgtttaactgtttgactcttatgatacttcttggaaactatgacatcaaagatagacttttgcctaagtggcttagctgggtctttcatagccaaacttgtatatttaaattctttgtaataataatatccaaatcataaaaaaaaaaaaaaaaagggcggccgc

SEQ ID NO: 14 - protein, 553 aa, Homo sapiens
MPLPWSLALPLLLSWVAGGFGNAASARHHGLLASARQPGVCHYGTKLACCYGWRRNSKGVCEATCEPGCKFGECVGPNKCRCFPGYTGKTCSQDVNECGMKPRPCQHRCVNTHGSYKCFCLSGHMLMPDATCVNSRTCAMINCQYSCEDTEEGPQCLCPSSGLRLAPNGRDCLDIDECASGKVICPYNRRCVNTFGSYYCKCHIGFELQYISGRYDCIDINECTMDSHTCSHHANCFNTQGSFKCKCKQGYKGNGLRCSAIPENSVKEVLRAPGTIKDRIKKLLAHKNSMKKKAKIKNVTPEPTRTPTPKVNLQPFNYEEIVSRGGNSHGGKKGNEEKMKEGLEDEKREEKALKNDIEERSLRGDVFFPKVNEAGEFGLILVQRKALTSKLEHKDLNISVDCSFNHGICDWKQDREDDFDWNPADRDNAIGFYMAVPALAGHKKDIGRLKLLLPDLQPQSNFCLLFDYRLAGDKVGKLRVFVKNSNNALAWEKTTSEDEKWKTGKIQLYQGTDATKSIIFEAERGKGKTGEIAVDGVLLVSGLCPDSLLSVDD

SEQ ID NO: 15 - DNA, 873 bp, Homo sapiens
  CDS (58)...(870)
gtcgacccacgcgtgcggcggcaacctcggaagtgcggagcgggtgggcctatatagatgttgaggtgcggaggccgtgggcttttgttgggcctggctgtagccgcagcagcggtaatggcagcacggcttatgggctggtggggtccccgcgctggctttcgccttttcataccggaggagctgtctcgctaccgcggcggcccaggggacccgggcctgtacttggcgttgctcggccgtgtctacgatgtgtcctccggccggaggcactacgagcctgggtcccactatagcggcttcgcaggccgagacgcatccagagctttcgtgaccggggactgttctgaagcaggcctcgtggatgacgtatccgacctgtcagccgctgagatgctgacacttcacaattggctttcattctatgagaagaattatgtgtgtgttgggagggtgacaggacggttctacggagaggatgggctgcccaccccggcactgacccaggtagaagctgcgatcaccagaggcttggaggccaacaaactacagctgcaagagaagcagacattcccgccgtgcaacgcggagtggagctcagccaggggcagccggctctggtgctcccagaagagtggaggtgtgagcagagactggattggcgtccccaggaagctgtataagccaggtgctaaggagccccgctgcgtgtgtgtgagaaccaccggcccccctagtggccagatgccggacaacccctccacacagaaatcgtggggacctggaccacccaaacttggcagagtacacaggctgcccaccgctagccatcacatgctcctttccactctaagccgtagcctcttctgttaa

SEQ ID NO: 16 - protein, 271 aa, Homo sapiens
MLRCGGRGLLLGLAVAAAAVMAARLMGWWGPRAGFRLFIPEELSRYRGGPGDPGLYLALLGRVYDVSSGRRHYEPGSHYSGFAGRDASRAFVTGDCSEAGLVDDVSDLSAAEMLTLHNWLSFYEKNYVCVGRVTGRFYGEDGLPTPALTQVEAAITRGLEANKLQLQEKQTFPPCNAEWSSARGSRLWCSQKSGGVSRDWIGVPRKLYKPGAKEPRCVCVRTTGPPSGQMPDNPSTQKSWGPGPPKLGRVHRLPTASHHMLLSTLSRSLFC

SEQ ID NO: 17 - DNA, 2689 bp, Homo sapiens
  CDS (67)...(1440)
cagcaggcagaggagcacttagcagcttattcagtgtccgattctgattccggcaaggatccaagcatggaatgctgccgtcgggcaactcctggcacactgctcctctttctggctttcctgctcctgagttccaggaccgcacgctccgaggaggaccgggacggcctgtgggatgcctggggcccatggagtgaatgctcacgcacctgcgggggaggggcctcctactctctgaggcgctgcctgagcagcaagagctgtgaaggaagaaatatccgatacagaacatgcagtaatgtggactgcccaccagaagcaggtgatttccgagctcagcaatgctcagctcataatgatgtcaagcaccatggccagttttatgaatggcttcctgtgtctaatgaccctgacaacccatgttcactcaagtgccaagccaaaggaacaaccctggttgttgaactagcacctaaggtcttagatggtacgcgttgctatacagaatctttggatatgtgcatcagtggtttatgccaaattgttggctgcgatcaccagctgggaagcaccgtcaaggaagataactgtggggtctgcaacggagatgggtccacctgccggctggtccgagggcagtataaatcccagctctccgcaaccaaatcggatgatactgtggttgcaattccctatggaagtagacatattcgccttgtcttaaaaggtcctgatcacttatatctggaaaccaaaaccctccaggggactaaaggtgaaaacagtctcagctccacaggaactttccttgtggacaattctagtgtggacttccagaaatttccagacaaagagatactgagaatggctggaccactcacagcagatttcattgtcaagattcgtaactcgggctccgctgacagtacagtccagttcatcttctatcaacccatcatccaccgatggagggagacggatttctttccttgctcagcaacctgtggaggaggttatcagctgacatcggctgagtgctacgatctgaggagcaaccgtgtggttgctgaccaatactgtcactattacccagagaacatcaaacccaaacccaagcttcaggagtgcaacttggatccttgtccagccagagggttggcattattgttcctaacagtgacggatacaagcagatcatgccttatgacctctaccatccccttcctcggtgggaggccaccccatggaccgcgtgctcctcctcgtgtggggggggcatccagagccgggcagtttcctgtgtggaggaggacatccaggggcatgtcacttcagtggaagagtggaaatgcatgtacacccctaagatgcccatcgcgcagccctgcaacatttttgactgccctaaatggctggcacaggagtggtctccgtgcacagtgacatgtggccagggcctcagataccgtgtggtcctctgcatcgaccatcgaggaatgcacacaggaggctgtagcccaaaaacaaagccccacataaaagaggaatgcatcgtacccactccctgctataaacccaaagagaaacttccagtcgaggccaagttgccatggttcaaacaagctcaagagctagaagaaggagctgctgtgtcagaggagccctcgttcatcccagaggcctggtcggcctgcacagtcacctgtggtgtggggacccaggtgcgaatagtcaggtgccaggtgctcctgtctttctctcagtccgtggctgacctgcctattgacgagtgtgaagggcccaagccagcatcccagcgtgcctgttatgcaggcccatgcagcggggaaattcctgagttcaacccagacgagacagatgggctctttggtggcctgcaggatttcgacgagctgtatgactgggagtatgaggggttcaccaagtgctccgagtcctgtggaggaggtgtccaggaggctgtggtgagctgcttgaacaaacagactcgggagcctgctgaggagaacctgtgcgtgaccagccgccggcccccacagctcctgaagtcctgcaatttggatccctgcccagcaaggtgggaaattggcaagtggagtccatgtagtctcacatgtggggtcggcctacagaccagagacgtcttctgcagccacctgctttccagagagatgaatgaaacagtcatcctggctgatgagctgtgtcgccagcccaagcccagcacggtgcaagcttgtaaccgctttaattgccccccagcctggtaccctgcacagtggcagccgtgttccagaacgtgtggcgggggtgttcagaaacgtgaggttctttgcaagcagcgcatggctgatggcagcttcctggagcttcctgagaccttctgttcagcttcaaaacctgcctgccagcaagcatgcaagaaagatgactgtcccagcgagtggcttctctcagactggacagagtgttccacaagctgcggggaaggcacccagactcgaagcgccatttgccgaaagatgctgaaaaccggcatctcaacggttgtcaattccaccctgtgcccgcccctgcctttctcttcctccatcaggccctgtatgctggcaacctgtgcaaggcccgggcggccatccacgaagcacagcccgcacatcgcggccgc

SEQ ID NO: 18 - protein, 458 aa, Homo sapiens
MECCRRATPGTLLLFLAFLLLSSRTARSEEDRDGLWDAWGPWSECSRTCGGGASYSLRRCLSSKSCEGRNIRYRTCSNVDCPPEAGDFRAQQCSAHNDVKHHGQFYEWLPVSNDPDNPCSLKCQAKGTTLVVELAPKVLDGTRCYTESLDMCISGLCQIVGCDHQLGSTVKEDNCGVCNGDGSTCRLVRGQYKSQLSATKSDDTVVAIPYGSRHIRLVLKGPDHLYLETKTLQGTKGENSLSSTGTFLVDNSSVDFQKFPDKEILRMAGPLTADFIVKIRNSGSADSTVQFIFYQPIIHRWRETDFFPCSATCGGGYQLTSAECYDLRSNRVVADQYCHYYPENIKPKPKLQECNLDPCPARGLALLFLTVTDTSRSCLMTSTIPFLGGRPPHGPRAPPRVGGASRAGQFPVWRRTSRGMSLQWKSGNACTPLRCPSRSPATFLTALNGWHRSGLRAQ

SEQ ID NO: 19 - DNA, 2689 bp, Homo sapiens
  CDS (67)...(2689)
cagcaggcagaggagcacttagcagcttattcagtgtccgattctgattccggcaaggatccaagcatggaatgctgccgtcgggcaactcctggcacactgctcctctttctggctttcctgctcctgagttccaggaccgcacgctccgaggaggaccgggacggcctgtgggatgcctggggcccatggagtgaatgctcacgcacctgcgggggaggggcctcctactctctgaggcgctgcctgagcagcaagagctgtgaaggaagaaatatccgatacagaacatgcagtaatgtggactgcccaccagaagcaggtgatttccgagctcagcaatgctcagctcataatgatgtcaagcaccatggccagttttatgaatggcttcctgtgtctaatgaccctgacaacccatgttcactcaagtgccaagccaaaggaacaaccctggttgttgaactagcacctaaggtcttagatggtacgcgttgctatacagaatctttggatatgtgcatcagtggtttatgccaaattgttggctgcgatcaccagctgggaagcaccgtcaaggaagataactgtggggtctgcaacggagatgggtccacctgccggctggtccgagggcagtataaatcccagctctccgcaaccaaatcggatgatactgtggttgcaattccctatggaagtagacatattcgccttgtcttaaaaggtcctgatcacttatatctggaaaccaaaaccctccaggggactaaaggtgaaaacagtctcagctccacaggaactttccttgtggacaattctagtgtggacttccagaaatttccagacaaagagatactgagaatggctggaccactcacagcagatttcattgtcaagattcgtaactcgggctccgctgacagtacagtccagttcatcttctatcaacccatcatccaccgatggagggagacggatttctttccttgctcagcaacctgtggaggaggttatcagctgacatcggctgagtgctacgatctgaggagcaaccgtgtggttgctgaccaatactgtcactattacccagagaacatcaaacccaaacccaagcttcaggagtgcaacttggatccttgtccagcccagagggttggcattattgttcctaacagtgacggatacaagcagatcatgccttatgacctctaccatccccttcctcggtgggaggccaccccatggaccgcgtgctcctcctcgtgtggggggggcatccagagccgggcagtttcctgtgtggaggaggacatccaggggcatgtcacttcagtggaagagtggaaatgcatgtacacccctaagatgcccatcgcgcagccctgcaacatttttgactgccctaaatggctggcacaggagtggtctccgtgcacagtgacatgtggccagggcctcagataccgtgtggtcctttgcatcgaccatcgaggaatgcacacaggaggctgtagcccaaaaacaaagccccacataaaagaggaatgcatcgtacccactccctgctataaacccaaagagaaacttccagtcgaggccaagttgccatggttcaaacaagctcaagagctagaagaaggagctgctgtgtcagaggagccctcgttcatcccagaggcctggtcggcctgcacagtcacctgtggtgtggggacccaggtgcgaatagtcaggtgccaggtgctcctgtctttctctcagtccgtggctgacctgcctattgacgagtgtgaagggcccaagccagcatcccagcgtgcctgttatgcaggcccatgcagcggggaaattcctgagttcaacccagacgagacagatgggctctttggtggcctgcaggatttcgacgagctgtatgactgggagtatgaggggttcaccaagtgctccgagtcctgtggaggaggtgtccaggaggctgtggtgagctgcttgaacaaacagactcgggagcctgctgaggagaacctgtgcgtgaccagccgccggcccccacagctcctgaagtcctgcaatttggatccctgcccagcaaggtgggaaattggcaagtggagtccatgtagtctcacatgtggggtcggcctacagaccagagacgtcttctgcagccacctgctttccagagagatgaatgaaacagtcatcctggctgatgagctgtgtcgccagcccaagcccagcacggtgcaagcttgtaaccgctttaattgccccccagcctggtaccctgcacagtggcagccgtgttccagaacgtgtggcgggggtgttcagaaacgtgaggttctttgcaagcagcgcatggctgatggcagcttcctggagcttcctgagaccttctgttcagcttcaaaacctgcctgccagcaagcatgcaagaaagatgactgtcccagcgagtggcttctctcagactggacagagtgttccacaagctgcggggaaggcacccagactcgaagcgccatttgccgaaagatgctgaaaaccggcatctcaacggttgtcaattccaccctgtgcccgcccctgcctttctcttcctccatcaggccctgtatgctggcaacctgtgcaaggcccgggcggccatccacgaagcacagcccgcacatcgcggccg

SEQ ID NO: 20 - protein, 874 aa, Homo sapiens
MECCRRATPGTLLLFLAFLLLSSRTARSEEDRDGLWDAWGPWSECSRTCGGGASYSLRRCLSSKSCEGRNIRYRTCSNVDCPPEAGDFRAQQCSAHNDVKHHGQFYEWLPVSNDPDNPCSLKCQAKGTTLVVELAPKVLDGTRCYTESLDMCISGLCQIVGCDHQLGSTVKEDNCGVCNGDGSTCRLVRGQYKSQLSATKSDDTVVAIPYGSRHIRLVLKGPDHLYLETKTLQGTKGENSLSSTGTFLVDNSSVDFQKFPDKEILRMAGPLTADFIVKIRNSGSADSTVQFIFYQPIIHRWRETDFFPCSATCGGGYQLTSAECYDLRSNRVVADQYCHYYPENIKPKPKLQECNLDPCPAQRVGIIVPNSDGYKQIMPYDLYHPLPRWEATPWTACSSSCGGGIQSRAVSCVEEDIQGHVTSVEEWKCMYTPKMPIAQPCNIFDCPKWLAQEWSPCTVTCGQGLRYRVVLCIDHRGMHTGGCSPKTKPHIKEECIVPTPCYKPKEKLPVEAKLPWFKQAQELEEGAAVSEEPSFIPEAWSACTVTCGVGTQVRIVRCQVLLSFSQSVADLPIDECEGPKPASQRACYAGPCSGEIPEFNPDETDGLFGGLQDFDELYDWEYEGFTKCSESCGGGVQEAVVSCLNKQTREPAEENLCVTSRRPPQLLKSCNLDPCPARWEIGKWSPCSLTCGVGLQTRDVFCSHLLSREMNETVILADELCRQPKPSTVQACNRFNCPPAWYPAQWQPCSRTCGGGVQKREVLCKQRMADGSFLELPETFCSASKPACQQACKKDDCPSEWLLSDWTECSTSCGEGTQTRSAICRKMLKTGISTVVNSTLCPPLPFSSSIRPCMLATCARPGRPSTKHSPHIAA

SEQ ID NO: 21 - DNA, 764 bp, Mouse
  CDS (211)...(750)
  misc_feature (1)...(764): n = A,T,C or G
ccgcgtccggctccctgcgagtcgccacgactcatcgccgctcccccgcgtccccaccccttctttcctccctcgcctacccccaccccccgcacttcggcacagctcaggatttgtttaaaccttgggaaactggttcaggtccaggttttgctttgatccttttcaaaaactggagacacagaagagggctctaggaaaaacttttggatgggattatgtggaaactaccctgcgattctctgctgccaaagaacggggactcgggctgagtccaacctgagcagcaagttgcagctctccagcgacaaggaacagaacggagtgcaagatccccggcatgagagagttgtcactatatctggtaatgggagcatccacagcccgaagtttcctcatacatacccaagaaatatggtgctggtgtggagattagttgcagtagatgaaaatgtgcggatccagctgacatttgatgagagatttgggctggaagatccagaagacgatatatgcaagtatgattttgtaggagttgaggagcccagtgatggaagcgttttaggacgctggtgtggttctgggactgtgccangaaagcagacttctaaaggaaatcatatcaggataagatttgcatctgatgagtattttccatctgaacccggattctgcatccactacagtattatcatgccacaagtcacagnaaccacgagtccttnggtgttgcccccttcatcttttgtnnnttgggacctgct

SEQ ID NO: 22 - protein, 180 aa, Mouse
  VARIANT (1)...(180): Xaa = Any Amino Acid
MGLCGNYPAILCCQRTGTRAESNLSSKLQLSSDKEQNGVQDPRHERVVTISGNGSIHSPKFPHTYPRNMVLVWRLVAVDENVRIQLTFDERFGLEDPEDDICKYDFVGVEEPSDGSVLGRWCGSGTVPXKQTSKGNHIRIRFASDEYFPSEPGFCIHYSIIMPQVTXTTSPXVLPPSSFV

SEQ ID NO: 23 - DNA, 4417 bp, Mouse
  CDS (3)...(1145)
ccgcgtccgctcagttggctcggattgcagacagtaaggaccacgtgtttcctgtgaacgacggcttccaggctctccaaggcattatccactcaattttaaagaaatcctgcatcgaaattctggcggctgaaccatccaccatctgcgcgggagagtcctttcaagtggtcgtaagaggaaatggcttccgacatgcccgcaatgtggacagggtcctctgcagcttcaaaatcaatgactcagtcacgctcaatgagaagccctttgctgtggaagacacttatttgctgtgcccagcaccaatcttgaaagaagttggcatgaaagctgcactgcaggtcagcatgaacgacggcctgtccttcatctccagttctgtcatcatcaccaccacacactgttcagacggctccatcctggcgattgctctgctggtcctcttcctgctgctggccctggcgctgctctggtggttctggcccctctgctgcacagtgatcatcaaggaggtccctccaccccctgttgaggagagtgaggaagaagacgatgatggtttgccaaagaagaaatggcccacagtagatgcctcttattatggtggacgcggtgtgggaggcattaaaagaatggaggtccgctggggagaaaagggctccacagaagaaggggcgaagttagaaaaggcaaagaatgcacgagtcaagatgccagagcaagaatatgagttcccagaaccccgaaacctcaacaacaacatgcgccggccttcctcgcctcggaagtggtactcgcccatcaagggaaaactcgatgccttgtgggttctgctgagaaaaggatatgaccgagtgtctgtgatgaggccacagccaggagacacgggacgctgtatcaacttcaccagagtgaagaacagtcagccagccaagtatcccctgaacaacacctaccaccccagctccccacctcccgctcctatctacacacccccaccccctgctccccactgccctcccccagcccccagtgcccccactcctcccattccttccccaccatccactctcccccctcctcctcaggccccaccccctaacagggcacctcccccctcccgacctcctccaaggccttctgtctagaacccaaagtccgagctctgggctgcctgagcaactccagcaggaggcttctctgctgaaagaaagatctgcccagcctatgtggtgagtggcggctgatgtttgcacgatttaaaagcaagtcgtgatgggcagaacaaaatgggcattttgaactgcctgaagacagacaatgagacaataacagtcacattatagcctgtgacccctcacctctagaggaaggttcccgagatggccacattgccacagtgctctcagccagattatgtcccatgaagaccaggaagaaagtgacttccaagaatggaatgcagcattggataagaagcacctggctgagattctgacctcactgatttgactcttgattcttggactgggagccaggccatctccacccctggtaccacccagcaactctgaaaatgtgcagtgtccctagtatgcatcgaataggtatccaactgggatctgcaggttgccttataaagagcatatgctctattctctttcccgaacttcctggtttcccagtgatgagggaaggggaaaggtgttgccatgcttagaagttagaggacgtcagtgctcagcactgatggagaagcgttgatgggagtgtccagctcttacatctagaaatggctggcttcagcaggcacagttcctaaaccaacaagccttgtcattgtcaaaggcaacctactaatgattcaccttaaacatcaaggttgactgtggcataggtcagagctgatcacacagaaccttccccatgaaatcgcaaggttcctcatcttcaaatacccaggaccccagagattcctaaatccagctaagagacagtagtcctgacttggcaagaaaaccattcccagttgttttactctgaaacaggccgttgtatgtatggtatatctctccttggcctttcaacctgctcacaagtattaccagttatgaagcaaggagaaatacatccagtgtgtaatagaaaagctctgcccgcaatccccatgtcactcctctacattattctgaagctgcttggtcagtgagccctttaacctcatgtagactctggacactgtcacccaatcatgaaaacagaggtcattgtcaaaggcagtgtatagcctgtacaaaaatgatgcttccttcctcagtttccacaggccccaaaattcctgtcttaggctcctaaacctctaaactttttcctggaacaaaagatataaaacgggcataagtttttatgttttgggctgtgatctccaaagatccttcaagaactcaagttagcctcattcttccagcttgtttagaacagaggcatccaggtgtcatgcactccatagacaccaatccttgttcccaaggcagacattattaatcaatctcagcactagttctcaatttaatccaattatatttttccacagtacttcacatctcttatgacctgttggtcatcagttagaattgagagagataaacactgtttgtaatccctaccttagaaagaaaagcagaggagaatgggggaaccaccagcataaaagttattatctggggaaaatcgacctgaaagaacgcccaagtccaagacctatggtgctgacaccaaagtaacactttcccaagtgtaccccagaccccactcttctccctgtggccaccactccctgcttttcaggagttgtgaaaaagatctccttcacccttactgtgcccccatattagaacaaggcttgtttagtgtagtccttgttaaacaggtgccagaatgtctcagccacctgagatgacattgctgggccccagaaaaccattccaaggagaatgggctccccaggctcagagcatgcaactatgagcccatggcaactgttttgactgctggcagtacaaaacgggccaccccacattacagctgcaggatttgtgcagccataagaaagtacgaaccaagatgctggcgttgctgttcaacaagcatgggcttcggggaaggcagcagactccgagagcaggccttgtgcagtgtcccaaggggctgtggtgaagtgtctgaggaaaaatgaatgctgatacatggtgattctgagaagaatttgcaaggtttgaccttagaatttatggaatgtcttccctggtcattcagaattatggctagaagtttctagaaaccgtcaaggttaatacctttcagagtaggtgattacaggcaggaagagctttgatgtggtttacaaagcccatcagttctgtgtcattccctgtaagcaacaggagatggtggttgtgattagcaaactgcatgtgttatttgtttgactccttgttattgtccttacggaggattttttttatataagccaaattttgttgtatatattcatattccacgtgacagatggaagcacgtcctatcagtgtgaataaaaagaacagttgtagtaaattattaaagccagtgatttcatggcaggttaccctaccaagctgtgcttgttgatctcccatgaccatactgcttttacaatgtacaaatagttcctaggtgacgagaccctcctttacataatgccgatgacagccttgctgggaactgcggtccttctgctgtgacagccagctcgaaaacaggtcctgcctggagcttgccacacactttagggagacataagagctgtctttccccagcgtcagggacaaagctaccataaagaagtggaaaagtcttggctctccagcctgggacagaggtctctctggaaccccaaggaagagcagaaatgatccttgcctgccactgcacacaatgtgatggtggaaaatccatcaaggaataattgtgagataatgaccgacagttcaggcgcaaagggaattcatgctgtgtaaagtgggtggaattcgtttgcaagctatgcaaagcctgatcttactcaccaggaggatggaaagggtttttttagttatctgagctcagctgagttatcacgcttggagaaccgatttaaaggaattagaatatgatttctgaatacacataacattaaactcttctctttttctatggtaatttagttatggacgttcagcgtctctgagttattgttataaaagacttgtcatcaccgcactgtgctgtaggagactgggctgaacctgtacaatggtataccctggaagttgcttttttaaaaaaaaataataataaacacctaaaatcagaaaaaaaaaaaaaaaagggcggccgc

SEQ ID NO: 24 - protein, 381 aa, Mouse
ASAQLARIADSKDHVFPVNDGFQALQGIIHSILKKSCIEILAAEPSTICAGESFQVVVRGNGFRHARNVDRVLCSFKINDSVTLNEKPFAVEDTYLLCPAPILKEVGMKAALQVSMNDGLSFISSSVIITTTHCSDGSILAIALLVLFLLLALALLWWFWPLCCTVIIKEVPPPPVEESEEEDDDGLPKKKWPTVDASYYGGRGVGGIKRMEVRWGEKGSTEEGAKLEKAKNARVKMPEQEYEFPEPRNLNNNMRRPSSPRKWYSPIKGKLDALWVLLRKGYDRVSVMRPQPGDTGRCINFTRVKNSQPAKYPLNNTYHPSSPPPAPIYTPPPPAPHCPPPAPSAPTPPIPSPPSTLPPPPQAPPPNRAPPPSRPPPRPSV

SEQ ID NO: 25 - DNA, 1180 bp, Mouse
  CDS (180)...(1179)
cagccactcacagctccaaacgttccccagctctccacctctgcgcgggctgccacagagcctgccagctgcgcgcaaaaccaaggtcctgaccagcgaagcagagaagaggcggtggcccctctgtttcgtaggtcctgaggggctcaggacaagaaaggagcccacccccggccagtatgcagccgccctggggcctggcgcttcctctgctgctcccctgggtgacaggtggagtagggaccagtccatgggattatgggttgtcagcactggcacaccagcctggggtctgtcagtatggaactaagatggcctgctgctatggctggaaaaggaacaacaagggagtatgcgaagctatgtgtgagcccaggtgcaagttcggtgagtgtgtgggaccgaataaatgtagatgctttccaggatacaccgggaagacctgcactcaagatgtgaatgagtgtggagtcaaaccccggccgtgccagcacagatgtgtgaatacacatggtagctacaaatgcttttgcctcagcggccacatgcttctaccagatgctacatgttcaaactccaggacgtgtgccagactaaactgccagtacggctgtgaagacacagaggaagggccacggtgtgtgtgtccatcctctggcctccgcctgggcccaaatggaagagtatgcctagatatcgatgaatgtgcgtctagcaaagcagtctgcccttccaatcgaagatgcgtgaacacgtttggaagctactactgcaaatgtcacattggttttgagctgaaatatatcggtcgccgatatgattgtgtagatataaatgagtgtgctctgaatacccatccgtgcagcccccatgccaattgcctcaatacccgaggatccttcaagtgcaaatgcaagcagggatataggggcaatggcctgcagtgttctgtgatccctgaacattctgtgaaggaaatactcacagcacctgggaccatcaaagaccgaatcaagaagttactggctcacaagcgcaccatgaagaaaaaggtgaaactaaaaatggtcaccccaagacccgccagtacacgtgtccctaaggtcaacttgccttacagctctgaggagggtgtttccaggggcagaaactatgatggagaacaaaaaaaaaaaaaaaa

SEQ ID NO: 26 - protein, 333 aa, Mouse
MQPPWGLALPLLLPWVTGGVGTSPWDYGLSALAHQPGVCQYGTKMACCYGWKRNNKGVCEAMCEPRCKFGECVGPNKCRCFPGYTGKTCTQDVNECGVKPRPCQHRCVNTHGSYKCFCLSGHMLLPDATCSNSRTCARLNCQYGCEDTEEGPRCVCPSSGLRLGPNGRVCLDIDECASSKAVCPSNRRCVNTFGSYYCKCHIGFELKYIGRRYDCVDINECALNTHPCSPHANCLNTRGSFKCKCKQGYRGNGLQCSVIPEHSVKEILTAPGTIKDRIKKLLAHKRTMKKKVKLKMVTPRPASTRVPKVNLPYSSEEGVSRGRNYDGEQKKKK

SEQ ID NO: 27 - DNA, 2154 bp, Mouse
  CDS (41)...(616)
gtcgacccacgcgtccgcacccgttaacgtatccgtctagccgcctctgccgccatctttgttgaggcggataaactgccgggatgcatccagagcatttgtgacaggagactattctgaagccggtcttgtggatgatataaatggcttgtcctcctctgagatactgacgctgcacaactggctttcattctacgagaaaaattatgtatttgtcggaagactggttggaaggttctacagaaaggatgggttacccacttcagaactaacccaggtagaagccatggtgactaaaggcatggaggcaaatgaacaggaacaaagagaaaagcagaagttcccaccatgcaattccgagtggagctctgctaagggcagcaggctctggtgctcccaaaagagtggaggtgtgcacagagactggattggtgtccccaggaagttgtataagccaggggccaaggagccccattgtgtgtgtgtgagaacaactggccctcctagtgaccagcaagacaaccctagacactcaaatcatggggacttggacaaccccaacttggaagaatacacaggctgcccaccactggctaccacatgttccttcccactctaagatggtgtcctgtatgtggctgacacatggagaaccttccagatctacagaaagccctcgatcttgtgccctagcatggctcctggcctgaaataggagtgtcaaggactccaaccacactctgcaaatgtgggtcacaattctactggctgagacaagagcctgatagcctatctcatatggtcagcttgttctgacagtgtttggaacctctgtcctctctcatcttccttcagagcctgcagacattaatgaacaaagtgaaatcaacatagaattgatcagataaggagtctgagagctccagaagggacttgccgtagacttggtgttgcctgaatcagagcttgcactctgcccatcatgccagtcctgctggtacttggagcaggactgtggttctcagtggaaaatcagacatttcccaagaagattttgcaccttagtaaaatgaaggtaactgttctaagtcacagggtaattgactgagctcttaacttctgacatttgtgacatttctaaaacctctactccagggcaaactgactccatgagaactgggatggtccagtgagatgagataataaactagagtagcagattctggggcttgacttacacagatggagcacaccataatccccctgccctggtgtgcatcaaacagctttctttactcatattgctagtgaaaagttgtccctctatgactgccacacgctgtaagaggcttcgctgcaggtttctcacccccgctgcagaattccgttctctgctgcacagccgcagctcttctcatctctttctggttcttgttttcgttttccagaaagggtctcattatgtagctctagctatcctggaagtcaccaggtagacggagctgacctggaactcacagaaatccacctgcctctgcctcccgagtattgggattaaagacatgcaccactatgtcctactaattttacctatcttgatctctgctacttaaaaaaaaaattacttgactttatgaggcaggatctcatgtttccaggtcagccttgaactcagtatgtaagcatgtgctcccatgcccagtttagtcagtaggaggggttgaatgaaccggagccacatacatgctaggcaagcactttaccaactgagctatatccctaggtccttgagcttcattgctcttgactttttttttttttttttcgtttttttgagacagggtttctctgtgtagctctggctgtcctggaactcactctgtagaccaggctggcctagaactcagaaatccacctgtctctgcctcccaagtgctaggattaaaggcgtgtgccaccacgcccagcgctcttgactttttgaccatgatgtcctgcaagatcctcataaagccctcacttgctgcactggtcccatcccttaggggttccttctgaggtagcatctccaatcaaaaagcttgataataaagatgtctgtgagttctgcaggcactgtaactccaaaaaaaaaaaaaaaaaaagggcggccgc

SEQ ID NO: 28 - protein, 192 aa, Mouse
PPLPPSLLRRINCRDASRAFVTGDYSEAGLVDDINGLSSSEILTLHNWLSFYEKNYVFVGRLVGRFYRKDGLPTSELTQVEAMVTKGMEANEQEQREKQKFPPCNSEWSSAKGSRLWCSQKSGGVHRDWIGVPRKLYKPGAKEPHCVCVRTTGPPSDQQDNPRHSNHGDLDNPNLEEYTGCPPLATTCSFPL

SEQ ID NO: 29 - DNA, 455 bp, Rat
  misc_feature (1)...(455): n = A,T,C or G
tncgagaacacgcttgttaacgtgtaagtccacgtctagcctcctttgccgccatctttgttgagggcggataagttgtaagccaggacggttttgcgtactgttccactttctcctccacgcttcacgttcagaatctattctggaaaagaaaaagagtcgcagatgaagagtaaactttactgtaaagtctgcagtgtcgcgctgctgacgtcacgaccagcgtctctgctgtcttagtcgtagcttgagaggtggctacctccaaagtgtgtcttgtgtgttgctgtgtaaatgctgaggatgcggtcttggtgtggtgctgagccttgctgtggcggcggcggctgtcttggccgtgtggttgatggattggtgggggttcccaccccagtattcgcctcttcgtacccgaggagctagcccgctatcgcggcggccaagggacccgggtc

SEQ ID NO: 30 - protein, 13 aa, Rat
PPLPPSLLRADKL

SEQ ID NO: 31 - DNA, 2576 bp, Homo sapiens
gtcgacccacgcgtccggggagctggtccctgcgctccctgcgccctggggatgcccctgccgccctgacgcccgccagcctgagccaccggcgcatgtgaccgcgcgtccgccccagtcccatccgtaggcgcccggcgcccggccccgcagcggcctcgttgtccccgccggcccccgcccggtctcccgcgctgccacccgccgccggccctgccgccatgcaggcgcgagcgctgctcctggccgcgttggccgcgctggcgctggcccgggagccccctgcggcgccgtgtcccgcgcgctgcgacgtgtcgcggtgtcccagcccccgctgccccggcggctacgtgcccgacctctgcaactgctgcctggtgtgcgccgccagcgagggcgagccctgtggcggccctctggactcgccttgcggcgagagcctggagtgcgtgcgcggcctatgccgctgccgctggtcgcacgccgtgtgtggcaccgacgggcacacctatgccaacgtgtgcgcgctgcaggcggccagccgccgcgcgctgcagctctccgggacgcccgtgcgccagctgcagaagggcgcctgcccgttgggtctccaccagctgagcagcccgcgctacaagttcaacttcattgctgacgtggtggagaagatcgcaccagccgtggtccacatagagctcttcctgagacacccgctgtttggccgcaacgtgcccctgtccagcggttctggcttcatcatgtcagaggccggcctgatcatcaccaatgcccacgtggtgtccagcaacagtgctgccccgggcaggcagcagctcaaggtgcagctacagaatggggactcctatgaggccaccatcaaagacatcgacaagaagtcggacattgccaccatcaagatccatcccaagaaaaagctccctgtgttgttgctgggtcactcggccgacctgcggcctggggagtttgtggtggccatcggcagtcccttcgccctacagaacacagtgacaacgggcatcgtcagcactgcccagcgggagggcagggagctgggcctccgggactccgacatggactacatccagacggatgccatcatcaactacgggaactccgggggaccactggtgaacctggatggcgaggtcattggcatcaacacgctcaaggtcacggctggcatctcctttgccatcccctcagaccgcatcacacggttcctcacagagttccaagacaagcagatcaaagactggaagaagcgcttcatcggcatacggatgcggacgatcacaccaagcctggtggatgagctgaaggccagcaacccggacttcccagaggtcagcagtggaatttatgtgcaagaggttgcgccgaattcaccttctcagagaggcggcatccaagatggtgacatcatcgtcaaggtcaacgggcgtcctctagtggactcgagtgagctgcaggaggccgtgctgaccgagtctcctctcctactggaggtgcggcgggggaacgacgacctcctcttcagcatcgcacctgaggtggtcatgtgaggggcgcattcctccagcgccaagcgtcagagcctgcagacaacggagggcagcgcccccccgagatcaggacgaaggaccaccgtcggtcctcagcagggcagcagcctcctcctggctgtccggggcagagcggaggctgggcttggccaggggcccgaatttccgcctggggagtgttggatccacatcccggtgccggggagggaagcccaacatccccttgtacagatgatcctgaaagtcacttccaagttctccggatattcacaaaactgccttccatggaggtcccctcctctcctagcttcccgcctctgcccctgtgaacacccatctgcagtatcccctgctcctgcccctcctactgcaggtctgggctgccaagcttcttcccccctgacaaacgcccacctgacctgaggccccagcttccctctgccctaggacttaccaagctgtagggccagggctgctgcctgccagcctggggtccctggaggacaggtcacatctgatccctttggggtgcgggggtggggtccagcccagagcaggcactgagtgaatgccccctggctgcggagctgagccccgccctgccatgaggttttcctccccaggcaggcaggaggccgcggggagcacgtggaaagttggctgctgcctggggaagcttctcctccccaaggcggccatggggcagcctgcagaggacagtggacgtggagctgcggggtgtgaggactgagccggcttccccttcccacgcagctctgggatgcagcagccgctcgcatggaagtgccgcccagaggcatgcaggctgctgggcaccaccccctcatccagggaacgagtgtgtctcaaggggcatttgtgagctttgctgtaaatggattcccagtgttgcttgtactgtatgtttctctactgtatggaaaataaagtttacaagcacaaaaaaaaaaaaaaaaaaaaaaagggcggccg

SEQ ID NO: 32 - protein, 453 aa, Homo sapiens
MQARALLLAALAALALAREPPAAPCPARCDVSRCPSPRCPGGYVPDLCNCCLVCAASEGEPCGGPLDSPCGESLECVRGLCRCRWSHAVCGTDGHTYANVCALQAASRRALQLSGTPVRQLQKGACPLGLHQLSSPRYKFNFIADVVEKIAPAVVHIELFLRHPLFGRNVPLSSGSGFIMSEAGLIITNAHVVSSNSAAPGRQQLKVQLQNGDSYEATIKDIDKKSDIATIKIHPKKKLPVLLLGHSADLRPGEFVVAIGSPFALQNTVTTGIVSTAQREGRELGLRDSDMDYIQTDAIINYGNSGGPLVNLDGEVIGINTLKVTAGISFAIPSDRITRFLTEFQDKQIKDWKKRFIGIRMRTITPSLVDELKASNPDFPEVSSGIYVQEVAPNSPSQRGGIQDGDIIVKVNGRPLVDSSELQEAVLTESPLLLEVRRGNDDLLFSIAPEVVM

SEQ ID NO: 33 - DNA, 1563 bp, Mouse
gattttaccccccggaaaggaagatggaattttctatgaaggccgacctgggaatgggaagataagaaaagaccaggagggagttaaatagggaatgggttggggcggcttggtaaatgtgctgggattaggctgttgcagataatgcaacaaggcttgaaggctaacctggggtgaggccgggttggggccgggctgggggtgggagaagtctcactggcggttgattgacagtttctccttccccagactgggggtaccgccaccatgcaggcgcgagcgctgcagctctccgggacgcccgtgcgccagctgcagaagggcgcctgcccgttgggtctccaccagctgagcagcccgcgctacaagttcaacttcattgctgacgtggtggagaagatcgcaccagccgtggtccacatagagctcttcctgagacacccgctgtttggccgcaacgtgcccctgtccagcggttctggcttcatcatgtcagaggccggcctgatcatcaccaatgcccacgtggtgtccagcaacagtgctgccccgggcaggcagcagctcaaggtgcagctacagaatggggactcctatgaggccaccatcaaagacatcgacaagaagtcggacattgccaccatcaagatccatcccaagaaaaagctccctgtgttgttgctgggtcactcggccgacctgcggcctggggagtttgtggtggccatcggcagtcccttcgccctacagaacacagtgacaacgggcatcgtcagcactgcccagcgggagggcagggagctgggcctccgggactccgacatggactacatccagacggatgccatcatcaactacgggaactccgggggaccactggtgaacctggatggcgaggtcattggcatcaacacgctcaaggtcacggctggcatctcctttgccatcccctcagaccgcatcacacggttcctcacagagttccaagacaagcagatcaaagactggaagaagcgcttcatcggcatacggatgcggacgatcacaccaagcctggtggatgagctgaaggccagcaacccggacttcccagaggtcagcagtggaatttatgtgcaagaggttgcgccgaattcaccttctcagagaggcggcatccaagatggtgacatcatcgtcaaggtcaacgggcgtcctctagtggactcgagtgagctgcaggaggccgtgctgaccgagtctcctctcctactggaggtgcggcgggggaacgacgacctcctcttcagcatcgcacctgaggtggtcatgtgaggggcgcatttctccagcgccaagcgtcatcgattactcgagccatgcgaccccacgccaccccgtgcctcctgcctccgcgcagcctgcagcgggagaccctgtccccgcccagccgtcctctggggtggacctagtttaataaagattaccaagtttcacgcatctgctggcctcccctgtgatttcctctaagccccaccttagtttctctttctgcccatactgggcacacaattctcagcccct

SEQ ID NO: 34 - protein, 348 aa, Mouse
MQARALQLSGTPVRQLQKGACPLGLHQLSSPRYKFNFIADVVEKIAPAVVHIELFLRHPLFGRNVPLSSGSGFIMSEAGLIITNAHVVSSNSAAPGRQQLKVQLQNGDSYEATIKDIDKKSDIATIKIHPKKKLPVLLLGHSADLRPGEFVVAIGSPFALQNTVTTGIVSTAQREGRELGLRDSDMDYIQTDAIINYGNSGGPLVNLDGEVIGINTLKVTAGISFAIPSDRITRFLTEFQDKQIKDWKKRFIGIRMRTITPSLVDELKASNPDFPEVSSGIYVQEVAPNSPSQRGGIQDGDIIVKVNGRPLVDSSELQEAVLTESPLLLEVRRGNDDLLFSIAPEVVM

SEQ ID NO: 35 - DNA, 1061 bp, Homo sapiens
  CDS (6)...(716)
gcaggatgaggccctgggttgccgtgctctcgctgttcccctctcggggctgggctggggccgctcttggccccaaggttgccccgggccagcagcccagccagcagcacagtctctatggtgctgaggaagagcagcagcagcaggatggtgaagtagtaaactgggggaggcagggcacagggagatgctcaggggccagtccctgtgtctctggtgcccagcgagctgagcaccagtgggtgaccggggagaaacagggcagactgggtaagggagcagggcttactgagcagtgggttgcaggaggaggagctgggcagggcctgcaccagggaggagtggaggacgaggtaactcagcagcaatgtcaccttgtagcctatgcgctcaatggcccggaggggcagcaaccccccgcacacgtcagccaacagcagtgcctctgcaggcaccaagagagcgatgatggacttgagcgccgtgttcttcagcctcagctggaaggggaaaagtcagggccttcccggcgggggggaaggaggtgggcatcgggggcatggggcctggcctctggccgtgcatcctcactcccacccgcctccagcagccctctgtcggcctcctcgcgacttgactcaccgtcacctggaagcagggcaccagctgctggggtgggacttgggtcttcagatcataaactacgtattccctcttgacactcacaatctcgttcaccacgtgggcctggaactctaactccatcgctgaggggtgggaatgagaactatgaaccaggaaggagagatcccagctgccaagtctgggggtagcagactggagcccaggggtgatggagacttttgatggcttttggcagggacagacttggacacaaaaccgatccatagaagggcttcccaaaccttgttttgcaacatcccaaattgtctccagttgaaggaaggcctttatcagattcatagatgagctttcattgtaaaaataaatgtactttgcaccacttcaaaaaaaaaaaaaaaaaaaaaaaagggcggccg

SEQ ID NO: 36 - protein, 237 aa, Homo sapiens
MRPWVAVLSLFPSRGWAGAALGPKVAPGQQPSQQHSLYGAEEEQQQQDGEVVNWGRQGTGRCSGASPCVSGAQRAEHQWVTGEKQGRLGKGAGLTEQWVAGGGAGQGLHQGGVEDEVTQQQCHLVAYALNGPEGQQPPAHVSQQQCLCRHQESDDGLERRVLQPQLEGEKSGPSRRGGRRWASGAWGLASGRASSLPPASSSPLSASSRLDSPSPGSRAPAAGVGLGSSDHKLRIPS

SEQ ID NO: 37 - DNA, 745 bp, Homo sapiens
  CDS (33)...(434)
ggttccgtgtgattaaattaacaggtttagagatgggtgtcctggttatttcctttattctcctcctggtagctgcctgcactcacagcatgttgggaatggtgattataaatgtaaccatgctctcttcttgtaagtggagagcccaggtacctcttatccagcatgtgaccctctttctacctcaggatagtcatactcttaggcttcctggatttattcaggggccaaaggagtggtcaaggtcctttttgttttgccctactccctttggaaaacatttagtttatgcccatgttacagattgcaaaatacaggcacatattctcactaatgtggtctgcatgtccctttgcaaggacatgcaatgtgacttcactactcctttcatcaagaaaaggagcctcttggccaggcacggtggctcacgcctgtaatcccagcactttgagaggccaaggcaggtggatcacgaggtcaggagatggagacctcctggctaacacagtgatacacagtctctactaaaaaatacaaaaaaaaaaaaaattagccaggcgtggtggcaggtgcctgtagtctcagctacttgggagcctgaggcaggagaatggcatgaacccaggaggcagagcttgcagtgagcctagatcgtgccactgcactccagcctgggcaacagtgcgagattctgactcaaaaaaaaaaaaaaaaaaaaaaaaaaaaaaaaaaaaagggcggccgc

SEQ ID NO: 38 - protein, 134 aa, Homo sapiens [sequence omitted]

SEQ ID NO: 39 - DNA, 1697 bp, Homo sapiens
  CDS (101)...(1528)
gtcgacccacgcgtccggggaagcgctgcaaggacaaccggctggggtccttgcgcgccgcggctcagggaggagcaccgactgcgccgcaccctgagagatggttggtgccatgtggaaggtgattgtttcgctggtcctgttgatgcctggcccctgtgatgggctgtttcgctccctatacagaagtgtttccatgccacctaagggagactcaggacagccattatttctcaccccttacattgaagctgggaagatccaaaaaggaagagaattgagtttggtcggccctttcccaggactgaacatgaagagttatgccggcttcctcaccgtgaataagacttacaacagcaacctcttcttctggttcttcccagctcagatacagccagaagatgccccagtagttctctggctacagggtgggccgggaggttcatccatgtttggactctttgtggaacatgggccttatgttgtcacaagtaacatgaccttgcgtgacagagacttcccctggaccacaacgctctccatgctttacattgacaatccagtgggcacaggcttcagttttactgatgatacccacggatatgcagtcaatgaggacgatgtagcacgggatttatacagtgcactaattcagtttttccagatatttcctgaatataaaaataatgacttttatgtcactggggagtcttatgcagggaaatatgtgccagccattgcacacctcatccattccctcaaccctgtgagagaggtgaagatcaacctgaacggaattgctattggagatggatattctgatcccgaatcaattatagggggctatgcagaattcctgtaccaaattggcttgttggatgagaagcaaaaaaagtacttccagaagcagtgccatgaatgcatagaacacatcaggaagcagaactggtttgaggcctttgaaatactggataaactactagatggcgacttaacaagtgatccttcttacttccagaatgttacaggatgtagtaattactataactttttgcggtgcacggaacctgaggatcagctttactatgtgaaatttttgtcactcccagaggtgagacaagccatccacgtggggaatcagacttttaatgatggaactatagttgaaaagtacttgcgagaagatacagtacagtcagttaagccatggttaactgaaatcatgaataattataaggttctgatctacaatggccaactggacatcatcgtggcagctgccctgacagagcgctccttgatgggcatggactggaaaggatcccaggaatacaagaaggcagaaaaaaaagtttggaagatctttaaatctgacagtgaagtggctggttacatccggcaagcgggtgacttccatcaggtaattattcgaggtggaggacatattttaccctatgaccagcctctgagagcttttgacatgattaatcgattcatttatggaaaaggatgggatccttatgttggataaactaccttcccaaaagagaacatcagaggttttcattgctgaaaagaaaatcgtaaaaacagaaaatgtcataggaataaaaaaattatcttttcatatctgcaagatttttttcatcaataaaaattatccttgaaacaaaaaaaaaaaaaaaaagggcggccgc

SEQ ID NO: 40 - protein, 476 aa, Homo sapiens
MVGAMWKVIVSLVLLMPGPCDGLFRSLYRSVSMPPKGDSGQPLFLTPYIEAGKIQKGRELSLVGPFPGLNMKSYAGFLTVNKTYNSNLFFWFFPAQIQPEDAPVVLWLQGGPGGSSMFGLFVEHGPYVVTSNMTLRDRDFPWTTTLSMLYIDNPVGTGFSFTDDTHGYAVNEDDVARDLYSALIQFFQIFPEYKNNDFYVTGESYAGKYVPAIAHLIHSLNPVREVKINLNGIAIGDGYSDPESIIGGYAEFLYQIGLLDEKQKKYFQKQCHECIEHIRKQNWFEAFEILDKLLDGDLTSDPSYFQNVTGCSNYYNFLRCTEPEDQLYYVKFLSLPEVRQAIHVGNQTFNDGTIVEKYLREDTVQSVKPWLTEIMNNYKVLIYNGQLDIIVAAALTERSLMGMDWKGSQEYKKAEKKVWKIFKSDSEVAGYIRQAGDFHQVIIRGGGHILPYDQPLRAFDMINRFIYGKGWDPYVG

SEQ ID NO: 41 - DNA, 1904 bp, Homo sapiens
  CDS (49)...(1524)
gtcgacccacgcgtccggatgcagatgctcacgtgaccagagctacacatgacttccagtccaaaggcgcctcctggagagcaaggacgcaaggaagcagagatgcccggaaccgcgctgtctccactgctcttgttgctgctcctgtcctgggcgtcccggaacgaagcagctccggaccaggatgaaatcgattgtctccccggcctggccaagcagccctctttccggcaatactccggctacctcagagcatcggactccaagcacttccactactggtttgtggagtcgcagaacgacccaaagaacagccccgtggtgctttggcttaacgggggtcccggctgcagctcgctcgatgggctgcttacagagcacggcccctttctgatccagccagatggtgtcaccctggagtacaacccctatgcttggaacctgattgccaacgtgctgtatatcgagtccccagctggggtgggcttctcctactcggatgacaagatgtacgtgaccaatgacacagaggtggcggagaacaattatgaagcccttaaagacttcttccgcctctttccggaatacaaggacaacaaacttttcctgacaggagagagctatgctggcatctacatccccaccttggctgtactggtcatgcaggatcctagcatgaatcttcaggggctggctgtgggcaatggacttgcctcctatgagcagaacgacaactccctggtctactttgcctactaccatggccttctggggaacagactttggacttcactgcagacccactgctgcgctcagaacaagtgtaacttctatgacaacaaagacccagagtgtgtaaacaatctcctggaagtgtctcgaattgtgggcaaatctggcctcaacatctacaatctctatgctccgtgtgctggtggggtgcccggcagacatagatatgaggacacacttgtagtccaggattttggcaacatcttcactcgcctgccacttaagcggagatttcctgaggcactgatgcgttctggggacaaggtacgcttggatcctccctgcaccaacaccacagccccttccaactacctcaacaacccctatgttcggaaggctctccacatccccgagtcgctgccccgctgggacatgtgcaacttcttggtgaatttacagtaccgccgcctctaccaaagcatgaactcccagtacctgaagctgctcagttcacagaaataccagatcctgctctacaacggagatgtggacatggcctgcaacttcatgggcgatgagtggtttgtggattcgctcaaccagaagatggaggtgcagcgccggccctggctagtggactacggggagagcggagaacaggtagctggtttcgtgaaggagtgttcacacatcaccttcctcaccatcaagggtgccggacacatggtccccacggacaagcctcgagctgcttttaccatgttctcgaggttcctgaacaaagagccttactgatagcttccgctgcaacccatggaaatcctcagtacctgatcagcccctctcggcctctctcagcagagaggagtcctccgctaatgctcccgtggggcaagtcctgtactaaaactgcccagacttctcacagcctggtgcatcccagcctgggcctcagggcgtcacagacagcctaggaccaagtgagcactttgttccggccatcgtggggtggcctgacctccccgactgcataaaaactgaccaccccaggaccccaacagagctagagaaacccaaggaggggggtggatggattctaattgatggttgactaattctggaattaaatcgggtatagcttccaaaaaaaaaaaaaaaagggcggccgctag

SEQ ID NO: 42 - protein, 492 aa, Homo sapiens
MTSSPKAPPGEQGRKEAEMPGTALSPLLLLLLLSWASRNEAAPDQDEIDCLPGLAKQPSFRQYSGYLRASDSKHFHYWFVESQNDPKNSPVVLWLNGGPGCSSLDGLLTEHGPFLIQPDGVTLEYNPYAWNLIANVLYIESPAGVGFSYSDDKMYVTNDTEVAENNYEALKDFFRLFPEYKDNKLFLTGESYAGIYIPTLAVLVMQDPSMNLQGLAVGNGLASYEQNDNSLVYFAYYHGLLGNRLWTSLQTHCCAQNKCNFYDNKDPECVNNLLEVSRIVGKSGLNIYNLYAPCAGGVPGRHRYEDTLVVQDFGNIFTRLPLKRRFPEALMRSGDKVRLDPPCTNTTAPSNYLNNPYVRKALHIPESLPRWDMCNFLVNLQYRRLYQSMNSQYLKLLSSQKYQILLYNGDVDMACNFMGDEWFVDSLNQKMEVQRRPWLVDYGESGEQVAGFVKECSHITFLTIKGAGHMVPTDKPRAAFTMFSRFLNKEPY

SEQ ID NO: 43 - DNA, 1758 bp, Mus musculus
gtcgacccacgcgtccgctctggtagaggaggttgtgacggtggctggaggacgcggcaatggaggaaggagacggcggcttgcggagcctggtccccggagggccactgttgctggttctgtacggtctcctggaggcgtccggcggcggccgagcgctgccccagctcagcgacgacatccccttccgagtcaactggcctggtaccgagttctctctgcctacaactggagttttgtataaagaagataattacatcatcatgacaactgctcataaagaaaaatacaaatgtatacttccacttgtgacaagtggggatgaggaagaagaaaaggattacaaaggccccaatccaagagagcttttggaaccactatttaaacaaagcagttgttcctacagaattgaatcttactggacttatgaggtctgtcatgggaaacatattcgacagtaccatgaagaaaaagaaactggccaaaaagtaaatattcatgaatactaccttgggaatatgttggctaagaatcttctgtatgaaaaagaacgagaagcaaaagaaaatgaaaagtcaaatgagattcccactaaaaacattgaaggtcagatgacaccctactatcctgttggaatgggaaatggtacaccttgtagtctgaaacaaaatcgacccagatcaagtactgtgatgtacatatgccatcctgaatctaagcatgagatcctttcagtagctgaagttacaacttgtgaatatgaagttgtcattttgacaccactcttgtgcagtcatcctaaatacaagttcagagcctctcctgtgaatgacatattctgtcaatcactgccgggctctccatttaaacccctcacactaagacagttggagcagcaggaagagatactgagagtgccattcaggagaaataaagaggaagatttgccatctgctaaggaagagagatttccagccatccacaaacctattgctgttggctctcagccagtgctcactgttggaacaacccacatttccaagctgacagatgaccagctcatcaaggagttcctaagtggctcttactgctttcatgggggtgttggttggtggaaatatgaattctgctatggcaaacatgtacatcaatatcacgaggacaaagataatggaaaaacttctgtagttgtggggacatggaaccaagaagagcatgttgagtgggctaagaaaaatactgctagagcgtatcatcttcaagacgatggcacccagacagtcaggatggtgtcacatttttatggaaatggggatatttgtgatataactgacaaacccagacaagtgactgtaaaactaaagtgtaaagaatcagactctcctcatgctgtcactgtgtatatgctagagcctcactcgtgccagtatattcttggggttgaatctccagtaatctgtaaaattctagatacagctgatgaaaatggacttctttctctccccaattaaaagatattaaagttgaaagaaagaaagatgattgaaaatcatcactttctcctgaccacatctctttatagagtctcaccattggaccttgtctgtagtatcacaaaaaggactggcaaccacactgtgaaattcacgtgtatataagagattacagataaacttgtaaggcagaaaaaaaaaaaaaaaaaaaaaaaaaaaaaaaaaaaaaaaaaaaaaaaaaaaaaaaaaaaaaaaagggccttta

SEQ ID NO: 44 - protein, 483 aa, Mus musculus
MEEGDGGLRSLVPGGPLLLVLYGLLEASGGGRALPQLSDDIPFRVNWPGTEFSLPTTGVLYKEDNYIIMTTAHKEKYKCILPLVTSGDEEEEKDYKGPNPRELLEPLFKQSSCSYRIESYWTYEVCHGKHIRQYHEEKETGQKVNIHEYYLGNMLAKNLLYEKEREAKENEKSNEIPTKNIEGQMTPYYPVGMGNGTPCSLKQNRPRSSTVMYICHPESKHEILSVAEVTTCEYEVVILTPLLCSHPKYKFRASPVNDIFCQSLPGSPFKPLTLRQLEQQEEILRVPFRRNKEEDLPSAKEERFPAIHKPIAVGSQPVLTVGTTHISKLTDDQLIKEFLSGSYCFHGGVGWWKYEFCYGKHVHQYHEDKDNGKTSVVVGTWNQEEHVEWAKKNTARAYHLQDDGTQTVRMVSHFYGNGDICDITDKPRQVTVKLKCKESDSPHAVTVYMLEPHSCQYILGVESPVICKILDTADENGLLSLPN

SEQ ID NO: 45 - DNA, 2252 bp, Homo sapiens
gtcgacccacgcgtccgggcgttgccgggctctccggaaggagacgtggcggcggttgggccggtgatacccgggcgctttatagtcccgccgcctcctcctccacctcctcctcctcctcctctcctcctggggcagaggaggttgtggcggtggctggagaaagcggcggcggaggatggaggaaggaggcggcggcgtacggagtctggtcccgggcgggccggtgttactggtcctctgcggcctcctggaggcgtccggcggcggccgagcccttcctcaactcagcgatgacatccctttccgagtcaactggcccggcaccgagttctctctgcccacaactggagttttatataaagaagataattatgtcatcatgacaactgcacataaagaaaaatataaatgcatacttccccttgtgacaagtggggatgaggaagaagaaaaggattataaaggccctaatccaagagagcttttggagccactatttaaacaaagcagttgttcctacagaattgagtcttattggacttacgaagtatgtcatggaaaacacattcggcagtaccatgaagagaaagaaactggtcagaaaataaatattcacgagtactaccttgggaatatgttggccaagaaccttctatttgaaaaagaacgagaagcagaagaaaaggaaaaatcaaatgagattcccactaaaaatatcgaaggtcagatgacaccatactatcctgtgggaatgggaaatggtacaccttgtagtttgaaacagaaccggcccagatcaagtactgtgatgtacatatgtcatcctgaatctaagcatgaaattctttcagtagctgaagttacaacttgtgaatatgaagttgtcattttgacaccactcttgtgcagtcatcctaaatataggttcagagcatctcctgtgaatgacatattttgtcaatcactgccaggatctccatttaagcccctcaccctgaggcagctggagcagcaggaagaaatactaagggtgccttttaggagaaataaagagggtgtcggttggtggaaatatgaattctgctatggcaaacatgtacatcaataccatgaggacaaggatagtgggaaaacctctgtggttgtcgggacatggaaccaagaagagcatattgaatgggctaagaagaatactgctagagcttatcatcttcaagacgatggtacccagacagtcaggtgcaaagaatcagattcacctcatgctgttactgtatatatgctagagcctcactcctgtcaatatattcttggggttgaatctccagtgatctgtaaaatcttagatacagcagatgaaaatggacttctttctctccccaactaaaggatattaaagttaggggaaagaaaagatcattgaaagtcatgataatttctgtcccactgtgtctcattatagagttctcagccattggacctcttctaaaggatggtataaaatgactctcaaccactttgtgaatacatatgtgtatataagaggttattgataaacttctgaggcagacatttgtctcgctttttttcatttttgttgtgtcttataaactgactgtttttctttgcttggatactgtgattccaaaataaatctcatccaagcaagttagagtccagcctaatcaaatgtcataattgttgtacctattgaaagtttttaaataatagatttattatgtaaattatagtatatgtaagtagctaatgaagtaaagatcatgaagaaagaaattgataggtgtaaatgagagaccatgtaaaatatgtaaattctagtacctgaaatcctttcaacagatttttatatagcaactgctctctgcaagtagttaaactagaaactgggcacatggtagaggctcacatgggagttgtcctcacccttgttaatctcaagaaactcttatttataataggttgcttctctctcagaacttttatctattacttttttcttcttatgagtatgtttactctcagagtatctatctgatgtagacagttggtgatgcttctgagactcagaatggtttactctaacaaaacactgtgctgtctatcccttgtacttgcctactgtaatatggatttcacttctgaacagtttacagcacaatatttattttaaagtgaataaaatgtccacaagcagtgttaaaaaaaaaaaaaaaaaaaagggcggccgc

SEQ ID NO: 46 - protein, 403 aa, Homo sapiens
MEEGGGGVRSLVPGGPVLLVLCGLLEASGGGRALPQLSDDIPFRVNWPGTEFSLPTTGVLYKEDNYVIMTTAHKEKYKCILPLVTSGDEEEEKDYKGPNPRELLEPLFKQSSCSYRIESYWTYEVCHGKHIRQYHEEKETGQKINIHEYYLGNMLAKNLLFEKEREAEEKEKSNEIPTKNIEGQMTPYYPVGMGNGTPCSLKQNRPRSSTVMYICHPESKHEILSVAEVTTCEYEVVILTPLLCSHPKYRFRASPVNDIFCQSLPGSPFKPLTLRQLEQQEEILRVPFRRNKEGVGWWKYEFCYGKHVHQYHEDKDSGKTSVVVGTWNQEEHIEWAKKNTARAYHLQDDGTQTVRCKESDSPHAVTVYMLEPHSCQYILGVESPVICKILDTADENGLLSLPN

SEQ ID NO: 47 - DNA, 1473 bp, Homo sapiens
gtgtcgacccacgcgtccgcgctggcaagatggcgggaggggtgcgcccgctgaggggcctccgcgccttgtgtcgcgtgctgctcttcctctcgcagttctgcattctgtcgggcggtgagcaatcgcaggcgctggctcagtcaataaaggatccgggcccaacacgcacattcacagtagttcccagggcagcagaaagtactgaaatcccaccttatgtgatgaagtgtccgagcaatggtttgtgtagcaggcttcctgcagactgtatagactgcacaacaaatttctcctgtacctatgggaagcctgtcacttttgactgtgcagtgaaaccatctgttacctgtgttgatcaagacttcaaatcccaaaagaacttcatcattaacatgacttgcagattttgctggcagcttcctgaaacagattacgagtgtaccaactccaccagctgcatgacggtgtcctgtcctcggcagcgctaccctgccaactgcacggtgcgggaccacgtccactgcttgggtaaccgtacttttcccaaaatgctatattgcaattggactggaggctataagtggtctacggctctggctctaagcatcaccctcggtgggtttggagcagaccgtttctacctgggccagtggcgggaaggcctcggcaagctcttcagcttcggtggcctgggaatatggacgctgatagacgtcctgctcattggagttggctatgttggaccagcagatggctctttgtacatttagctgtggtgtgtgcttcagaaaggagcagggcttagaaaaagcccttttgtccgtaggagttgatgtggtgtgagtgatatatttctatgtttttaatgtacagcatctgtactttgtttgccttgataaaggtaagataatgaaacgctgaactatgctaatctggaatttgtttttatttgcctgaaatatatttttttctgtgaaaaaattaaaacgtacttaagccaggagaatgaattatacagtgattgaaaatccatttaattcctatgacttttgttttgtattgcccaagtcaaactacatcacttgtatctccagcccaaatgtagtctgccttgaaaagtctttcagctgtgactgcaggaagtgggagtgtttttattgttagctaattgctgtgactgcaggaagtgggagtgtttctgttgttggctaattgaagttattaggctcagcttcagtcatgtgtaagttttgcagtgtaatacatatgtagtctggtctgtatatatgaaaatttgaattaaactgcagaatgtttatgtctagttatggtttaaattttcttagtagtatataaaaggtaagagtactgaaaaattaataaaattgcaagttaagaaaaaaaaaaaaaaaaaaaaaaaaaaaaaaaaaaaaaaaaaaaaaaaaaaaaaaaaaaaaaaaaaagggcggc

SEQ ID NO: 48 - protein, 247 aa, Homo sapiens
MAGGVRPLRGLRALCRVLLFLSQFCILSGGEQSQALAQSIKDPGPTRTFTVVPRAAESTEIPPYVMKCPSNGLCSRLPADCIDCTTNFSCTYGKPVTFDCAVKPSVTCVDQDFKSQKNFIINMTCRFCWQLPETDYECTNSTSCMTVSCPRQRYPANCTVRDHVHCLGNRTFPKMLYCNWTGGYKWSTALALSITLGGFGADRFYLGQWREGLGKLFSFGGLGIWTLIDVLLIGVGYVGPADGSLYI

SEQ ID NO: 49 - DNA, 854 bp, Mus musculus
aaaaatggaggctgcggccgagccgctgcggtctgtccgccacctgtcccgcgtgctgcttttcctgtcccagtgctacattctgtcgggagatgagaatcagctgttctctcacctcacagaaagtactgaaatccctccttacatgacgaagtgtccaagcaatggtttgtgtagcagacttcctgcagactgtatagaatgtgcgaccaatgtctcctgcacttacgggaagcctgtcacgttcgactgcacagtgaagccctctgttacctgtgtcgatcaagacctcaaaccccagaggaacttcgtcatcaacatgacttgcaggttttgctggcagcttcctgaaacagactacgagtgttcaaattccaccacctgcatgaccgtggcttgccctcggcagcgctatttcgccaactgcaccgtgcgtgaccacattcactgcctgggcaaccggactttccctaagctgctgtactgcaactggacaggtggctacaagtggtcgacagccctggctctcagcatcacccttggggggtttggagccgatcgcttctacctgggccagtggcgagaaggcctcggcaagctcttcagctttggcggcctgggaatatggaccctaatcgatgtcttgctgattggagttggctatgtgggaccagcggatggctctttgtacatttagccgaggttatgtgcttcagagagcagtgtagagtcctgtgtgtggagatggatgcggtgtgagagggggatttatgtttttaatgtacagcatctgtacttggcttgccttgatgaaggtaaaataaagaaatcgaacactgaaaaaaaaaaaaaaa

SEQ ID NO: 50 - protein, 230 aa, Mus musculus
MEAAAEPLRSVRHLSRVLLFLSQCYILSGDENQLFSHLTESTEIPPYMTKCPSNGLCSRLPADCIECATNVSCTYGKPVTFDCTVKPSVTCVDQDLKPQRNFVINMTCRFCWQLPETDYECSNSTTCMTVACPRQRYFANCTVRDHIHCLGNRTFPKLLYCNWTGGYKWSTALALSITLGGFGADRFYLGQWREGLGKLFSFGGLGIWTLIDVLLIGVGYVGPADGSLYI

SEQ ID NO: 51 - DNA, 3677 bp, Homo sapiens
  CDS (307)...(1770)
ctccactcctagtttgttctgccgtcgccgcgtcccagggaccccttgtcccgaagcgcacggcagcgggggggacttcagccctccaggcggggtgggttccaggtccgggtccgaggcgggcgctggaggctcggccccaggccggagaggaactcctttcgcgagctgccgcaggcgccggcgtctcagctgctcgccgccccccaccccagagtgcgtgccgggtgactcccgccacctttgcgaccctcctgagcttaggggactgcgagcgggagggagtctcaggcccccggccgcaggatggtggcggagcggtccccggcccgcagccccgggagctggctgttccccgggctgtggctgttggtgctcagcggtcccggggggctgctgcgcgcccaggagcagccctcctgcagaagagcctttgatctctacttcgtcctggacaagtctgggagtgtggcaaataactggattgaaatttataatttcgtacagcaacttgcggagagatttgtgagccctgaaatgagattatctttcattgtgttttcttctcaagcaactattattttgccattaactggagacagaggcaaaatcagtaaaggcttggaggatttaaaacgtgttagtccagtaggagagacatatatccatgaaggactaaagctagcgaatgaacaaattcagaaagcaggaggcttgaaaacctccagtatcataattgctctgacagatggcaagttggacggtctggtgccatcatatgcagagaaagaggcaaagatatccaggtcacttggggctagtgtttattgtgttggtgtccttgattttgaacaagcacagcttgaaagaattgctgattccaaggagcaagttttccctgtcaaaggtggatttcaggctcttaaaggaataattaattctatactagctcagtcatgtactgaaatcctagaattgcagccctcaagtgtctgtgtgggggaggaatttcagattgtcttaagtggaagaggattcatgctgggcagtcggaatggcagtgttctctgcacttacactgtaaatgaaacatatacaacgagtgtaaaaccagtaagtgtacagcttaattctatgctttgtcctgcacctatcctgaataaagctggagaaactcttgatgtttcagtgagctttaatggaggaaaatctgtcatttcaggatcattaattgtcacagccacagaatgttctaacgggatcgcagccatcattgttattttggtgttactgctactcctggggatcggtttgatgtggtggttttggcccctttgctgcaaagtggttattaaggatcctccaccaccacccccccctgcaccaaaagaggaggaagaagaacctttgcctactaaaaagtggccaactgtggatgcttcctattatggtggtcgaggggttggaggaattaaaagaatggaggttcgttggggtgataaaggatctactgaggaaggtgcaaggctagagaaagccaaaaatgctgtggtgaagattcctgaagaaacagaggaacccatcaggcctagaccacctcgacccaaacccacacaccagcctcctcagacaaaatggtacaccccaattaagggtcgtcttgatgctctctgggctttgttgaggcggcagtatgaccgggtttctttgatgcgacctcaggaaggagatgagggccggtgcataaacttctcccgagttccatctcagtaaaagggaagcaggaagaccaagaaggtacgaagatggcacattttcacatagctgattttcaaccaaatgaaaaaaatcaagtgcatttcagaagcttttggaagagcagcttaattcctctcagtcgggaaatgttttctctgccttctgctttgcttgcaccaaacatttctaaacacttgttctgccatctacatgggaggtgatgaaactcagtggtaactcatgatttatgacattgaaaataaagaggaacattgacctgcagactatggtttgtacaagaaagtttgtttgaatgtgtagaacgaggaaaaagcaacaacagcaacaacacgaagatgataccaaaacaaggaccacaaaacaactagccatgatgggagacaggagttttttacatggaaacatggcacttgtgtttttatgtggcaagatctttatccataggcagagtatgaaatttcccaccaggctaagcaaataaagaagtccattgccttatagctatgtcagatcacagaatccttccaagtgctctatcacagtgtgccttatgggaagtttctgactggaaaatcttgtcattctaacactgaaaagtgcacacgcatgacaaaatgtagacaagatgcctcaaggtattggtagcaagcaagattttgccctttagttttcgaagacacctttctttcattatgcactcgggacaagaaaattaatagagcgttattccacagaaggcctctagccagagatcttgagtgtagtgcaagggactcatgctttgcgaacttgtccctgtgactagtagattcccccttttcctgtgtttaggatttagtagtgcataaagcattaatatccataaacatacctagaagtttgttttgcttttaatttaaaggaagcagtaaccacaaagcttccgctcagggttttttctttcttcaagtctccaagggctcttcagcgtcacaagccagcaactctctttgcattaaaatttcaaagtttaattaatataattaaaagcaacagcaagcagcagcctgtgaagattttgctcatcttttttatgccttttgacattgaatgacctattactgtatgcgcattacttggattttgaggggcactctaccttggttatgattcagtagaggaaaaagaccacctttcttcaatttacaaattaaatcttctggagggtcgctatcacaaaacattgacgatgtatgtattataattttttagaaaaaccaccatcgtgtcacgtcgacgatgccaaattatgttagcgtgagcagaaacaccgtgggggaggaaggcagcagctgaagaaaaaagctcaaatgatctagtcactttcgatactgtacttcagatgcgaaatggatattcgagtggaaacctgacaaagtgcgcctgctttgatgtgaactggtatagacaatgaccagtggctgggtcagtgggatgtctctctgtgagcacaaaggcttatcaaatgacactaaagataagttcaacaaccatcacattggaagggagaaggcgaacatttcatgtttggcgggcatgtgagtgcacaagatggaaagagcgattggagcatcctggtataattacccccattgtgctcttaatggaaatttcaaaggacgggagtattctgttggttggtgtccaggtttgtggcactgttccaagaggccttacacacacacacaaatatataattttctatacatatatatcctctagcttgaaacttttgctcaagtttatttatgtccctggctggctggatccaaagtcatgtgtccacacattcataaataaaaattttacctatgaaaaaaaaaaaaaaaaaaaaaaaaaaaaaaaaaaaaaaaaaaaaa

SEQ ID NO: 52 - protein, 488 aa, Homo sapiens [sequence omitted]

SEQ ID NO: 53 - DNA, 3501 bp, Mouse
  CDS (149)...(1609)
ttctcgcgagctgccgcaggcgccggcgtctcagctgctcgccgccccccaccccagagtgcgtgccgggtgactcccgccacctttgcgaccctcctgagcttaggggactgcgagcgggagcgcgtctcaggcccccggccgcaggatggtggccggtcggtcccgggcgcgcagccctgggagctggctgttccctggcctgtggttgttggctgtgggcggtccggggtcgttgctgcaagcccaggagcagccctcttgcaaaaaagccttcgatttgtacttcgtactggacaagtctggcagtgtagcaaataactggattgaaatttataattttgtccaccagctgacagagagatttgtgagccctgaaatgagattgtccttcattgtgttttcttcccaagcaaccattattttgccattaactggagacaggtacaaaattggcaaaggactggaggatttaaaggccgttaagccagttggagaaacatacatccatgaaggactaaagcttgcaaacgaacaaattcaaaatgcaggaggcttaaaagcctccagtatcataattgctttgacggacggtaagctggacggcctggtaccatcttatgcagagaacgaggcaaagaagtccaggtcacttggcgctagtgtttactgcgttggggtccttgattttgaacaagctcagctggaaagaattgctgattccaaggaccaggttttccctgtcaaaggtggatttcaagctctcaaaggcatcatcaactctatattagctcaatcatgtactgaaatcctggaattgagtccttcaagtgtctgtgtaggggagaaatttcaagttgttctgactggaagagcagtcacgtcgatcagtcacgatggcagtgtcctctgtacattcactgcaaacagcacatatacaaagagtgagaagccagtgagcattcagccaagttccatcctttgtcctgcacctgtcctgaacaaagatggagaaactcttgaagtttcaatcagctataatgatgggaagtctgctgtctcaagatccttaacaatcacagccacagaatgtaccaatgggattgcagccatcgtagctattttggtgttgttgctgctcttgggtgctgccttgatgtggtggttttggcccctttgctgcaaagtggttatcaaggaccctcccccaccaccttctgcaccaatggaggaggaggaggaggatcctttgcccaacaagaagtggccgactgtggacgcttcctactacggaggtcgaggtgttggaggaattaaaaggatggaggtccgctggggagataaaggatctacagaggaaggtgcaaggctagagaaagcaaaaaatgctgtggtgatggtccctgaagaagagatccccatcccatccagaccacctcgacccagacccacacaccaggcacctcagacaaagtggtacacgccaatcaagggtcgtttggatgcactctgggctttgatcatgaagcagtatgaccgggtgtccttgatgagaccccaggaaggtgatgagggccgatgcataaacttctcccgggttccacatcaataagacgggagaacaaagaatgagaagataagaagacagtgtgacagtgtatcttcatgatgctgatttccaacagaaccgacagtccggtgcatctcagaagttcttgggacaacagcccattttctctctgtcaggaaatgtttcctctgccttctgctttctgtgcactaaacattttccaacacttgttctgccatcgacatgagaggtgatgaaagtcatcggcgatagcccatgattcacgacactgaaaatcccgaggaatgttagtttgcatgctagggtttatgcaaagctcgttttgactatgtaagaggacaaagcagacacatcgatgatgtaatgataccaaagctaggactgcaaatccaccagccacagaggtttgcaatggagactggtgattctgccatgaatgtgtggcccctgtgcttttgtttggcaagatctttagctacaagcaaaacatgaagtttcctcccaggctaaacagataatggagtccactgccttgtagctatgtcagatagcaaagcctttccaagtcctccattactttgtgccttacaggaaatttctgactagaaaatcttgtcactgttacactgaaagtgcacacgcatgacaaaatgtagacgagacgcctcaaggtactggatgcaagcaggatttttgccctttagttttccaagacacctttcttttattatgcacttgagacaagagaattaatagagcgttaattcaacaggaagaccgcctccaaccaaagacctggagcgcagcataaggacttgtgatttgagacgttgtccccagcctggtagatccccctttctcagcatttgggatttagcagtgcataaagcattaatatctgtaaaaacacctagatgtttgtttggcttttaatttaaggaagctgcaaccacaaagcttccgctcagggttttttcttccttcaagtctccaagggctcttcagcgtcacaagccagcaactctctttgcatgaaaatttcaaagtttaattaataattaaaggcaacagcaagcagcagcctgtgaagattttgctcatcttttttatgccttttgatattgagtgacctatcactgtatgcatgttacttagaaattgaggagcaccacaccttggttgtggttcagcctgggaaagagacctccttccttctgtttataaattaaaatcaggaggggcgccatcagaaagcatggacaatatacatactataaatttttagaaatatcaccatcgtgtcacgtcaacgatgccaaattatgttagtgtgagcagaaacccggtgggggaggaaggcggcagcagccgaaggaaatagctcagataatctagtcactttcgatactgtacttcagatgcgaaatggatattcgactggaaacctgacaaagcgcgcctgctttgatgtgaactgttatagacaatgaccagtggccgggtcagtgggatgtctctctgcgagcacaaaggcttatcaaatgacactaaaaataagttcaacaaccatcactttggaagggagaaggcgaacatttcatgtttggcgggcatgtgagtgcaggagatggaaagagccatttagagcatcctcatataattgcccgcattgtactcttcatggaaatttcaaaggacggcagtgatatttttcattggtgtccacgtttgtggcactgctccaagaagccttatgcacacatacaaatatacaaatgcacacacctacactctctagctttaatctttttgctcaaccttatttatatcactgactggctggatccaaagtcacacctccacatattagtgaataaaaaatttttacctgtgaaaaaaaaaaaaaaaaa

SEQ ID NO: 54 - protein, 487 aa, Mouse
MVAGRSRARSPGSWLFPGLWLLAVGGPGSLLQAQEQPSCKKAFDLYFVLDKSGSVANNWIEIYNFVHQLTERFVSPEMRLSFIVFSSQATIILPLTGDRYKIGKGLEDLKAVKPVGETYIHEGLKLANEQIQNAGGLKASSIIIALTDGKLDGLVPSYAENEAKKSRSLGASVYCVGVLDFEQAQLERIADSKDQVFPVKGGFQALKGIINSILAQSCTEILELSPSSVCVGEKFQVVLTGRAVTSISHDGSVLCTFTANSTYTKSEKPVSIQPSSILCPAPVLNKDGETLEVSISYNDGKSAVSRSLTITATECTNGIAAIVAILVLLLLLGAALMWWFWPLCCKVVIKDPPPPPSAPMEEEEEDPLPNKKWPTVDASYYGGRGVGGIKRMEVRWGDKGSTEEGARLEKAKNAVVMVPEEEIPIPSRPPRPRPTHQAPQTKWYTPIKGRLDALWALIMKQYDRVSLMRPQEGDEGRCINFSRVPHQ

SEQ ID NO: 55 - DNA, 969 bp, Homo sapiens
  CDS (6)...(761)
gggagatggcggagctggagtttgttcagatcatcatcatcgtggtggtgatgatggtgatggtggtggtgatcacgtgcctgctgagccactacaagctgtctgcacggtccttcatcagccggcacagccaggggcggaggagagaagatgccctgtcctcagaaggatgcctgtggccctcggagagcacagtgtcaggcaacggaatcccagagccgcaggtctacgccccgcctcggcccaccgaccgcctggccgtgccgcccttcgcccagcgggagcgcttccaccgcttccagcccacctatccgtacctgcagcacgagatcgacctgccgcccaccatctcgctgtcagacggggaggagcccccaccctaccagggcccctgcaccctccagcttcgggaccccgagcagcagctggaactgaaccgggagtcggtgcgcgcacccccaaacagaaccatcttcgacagtgacctgatggatagtgccaggctgggcggcccctgcccccccagcagtaactcgggcatcagcgccacgtgctacggcagcggcgggcgcatggaggggccgccgcccacctacagcgaggtcatcggccactacccggggtcctccttccagcaccagcagagcagtgggccgccctccttgctggaggggacccggctccaccacacacacatcgcgcccctagagagcgcagccatctggagcaaagagaaggataaacagaaaggacaccctctctagggtccccaggggggccgggctggggctgcgtaggtgaaaaggcagaacactccgcgcttcttagaagaggagtgagaggaaggcggggggcgcagcaacgcatcgtgtggccctcccctcccacctccctgtgtataaatatttacatgtgatgtctggtctgaatgcacaagctaagagagcttgcaaaaaaaaaaaaaaaaaa

SEQ ID NO: 56 - protein, 252 aa, Homo sapiens
MAELEFVQIIIIVVVMMVMVVVITCLLSHYKLSARSFISRHSQGRRREDALSSEGCLWPSESTVSGNGIPEPQVYAPPRPTDRLAVPPFAQRERFHRFQPTYPYLQHEIDLPPTISLSDGEEPPPYQGPCTLQLRDPEQQLELNRESVRAPPNRTIFDSDLMDSARLGGPCPPSSNSGISATCYGSGGRMEGPPPTYSEVIGHYPGSSFQHQQSSGPPSLLEGTRLHHTHIAPLESAAIWSKEKDKQKGHPL

SEQ ID NO: 57 - DNA, 1713 bp, Mouse
  CDS (2)...(652)
gctgagccactacaagctgtcagcccgctccttcatcagccgacacagccaggccaggaggagagacgatggactgtcctcggaaggatgcctctggccctcagagagtacggtgtcaggtggaatgccggagccacaggtctatgccccgcctcggcccactgaccgactcgctgtgccccccttcatccagcggagccgattccaacccacctacccctacctgcagcacgaaattgccctgccacccaccatctcactgtctgatggggaggagcccccaccctaccagggcccctgcaccctccagctacgggaccctgagcaacagctggagctgaaccgggaatctgtgcgcgcaccccctaaccggaccatcttcgacagtgaccttatagacagcaccatgctggggggcccctgtccccccagcagtaactcgggcatcagcgccacctgctacagcagcggtgggcgcatggaggggccgccccccacctacagcgaggtcattggccactaccctggctcctccttccagcaccagcaaagtaacgggccatcctccctgctagaggggacccggctccatcactcgcacattgccccactggagaacaaggagaaggagaaacagaaaggtcaccccctctaggagtgggggccggggcgcctgtaggcaaaaccgcaaaaaaaaaagaaaggaaaaaaaaaacactccgcacttcttaagagagaagagagaggaagtcaggggacacacaggctgagtggccgtgtggtagttctcctgtctgtgtataaatatttacatgttctgtgtggtctgaatgcagaagctcaaaaagcttgcaaaaaagaaaaaagaaaatgtttctttgttgagccgtgtcttgaaggcaaaagagaaaatgctctactagtctttccttcattgttcttagttgagctctgtgcgtgaatgcttaatttcttttgtttatgacggttttacttaactttaaagacatatttgcacaaaacctttgtttaagatctgcaatattatatatataaatatatatataaaataagagaactctgtatgtgggagagcaggagtatttttgtattagaagaggcctattcaaaaaaaaaaaagttgttttctgaactagaagagaaaaaaaatggcaattttttgagtgccaactccgaaagtgtgtattaccttgtaaagaaaaaaaaaacctacaaagcaggggtttagagctatttatataaatgctgcgattttgcactattttttaatataatatatcagtgcttgtttgatggaaacttctagagagtgtgttgagacttggagaaatgttgagtttaagtctgaacagagcagcaggggtgtgtccctccaccccctgggtctcagagggcccccactgtgcaggaaagccaggctcccccagggccacacagcatgccgcctgcaagccaatggatgcttctgtccagacaggctgtgaacagttacacattccctgccgaaggggacccgtgatgtgtcgtccctctgggttacagctgagtcaggaccgtctcccccgcaccgccccccaacagaggcatccaattccagatgcctttcccaatatgaaaataaactgttaccgaaggaatcttaaaaaaaaaaaaaaaaaaaaaaaaaaaaaaaaaaaaaaaaaaaaaaaaaaa

SEQ ID NO: 58 - protein, 217 aa, Mouse
LSHYKLSARSFISRHSQARRRDDGLSSEGCLWPSESTVSGGMPEPQVYAPPRPTDRLAVPPFIQRSRFQPTYPYLQHEIALPPTISLSDGEEPPPYQGPCTLQLRDPEQQLELNRESVRAPPNRTIFDSDLIDSTMLGGPCPPSSNSGISATCYSSGGRMEGPPPTYSEVIGHYPGSSFQHQQSNGPSSLLEGTRLHHSHIAPLENKEKEKQKGHPL

SEQ ID NO: 59 - DNA, 1682 bp, Homo sapiens
  CDS (322)...(999)
gcggtgacggcggcgcctggcggcggggatttggcgcgggccgggggccgggggccggggcgcgggggcgcgaggctggattcctagggccgcggcgcttcccggcatgctccgctgcaggcccgcgcccgcgcccggactttgccatcggcggggcagtcgcgggatgcgcccgggagccacagcctgaggccctcaggtctctgcaggtgtcgtggaggaacctagcacctgccatcctcttccccaatttgccacttccagcagctttagcccatgaggaggatgtgaccgggactgagtcaggagccctctggaagcatggagactgtggtgattgttgccataggtgtgctggccaccatctttctggcttcgtttgcagccttggtgctggtttgcaggcagcgctactgccggccgcgagacctgctgcagcgctatgattctaagcccattgtggacctcattggtgccatggagacccagtctgagccctctgagttagaactggacgatgtcgttatcaccaacccccacattgaggccattctggagaatgaagactggatcgaagatgcctcgggtctcatgtcccactgcattgccatcttgaagatttgtcacactctgacagagaagcttgttgccatgacaatgggctctggggccaagatgaagacttcagccagtgtcagcgacatcattgtggtggccaagcggatcagccccagggtggatgatgttgtgaagtcgatgtaccctccgttggaccccaaactcctggacgcacggacgactgccctgctcctgtctgtcagtcacctggtgctggtgacaaggaatgcctgccatctgacgggaggcctggactggattgaccagtctctgtcggctgctgaggagcatttggaagtccttcgagaagcagccctagcttctgagccagataaaggcctcccaggccctgaaggcttcctgcaggagcagtctgcaatttagtgcctacaggccagcagctagccatgaaggcccctgccgccatccctggatggctcagcttagccttctactttttcctatagagttagttgttctccatggctggagagttcagctgtgtgtgcatagtaaagcaggagatccccgtcagtttatgcctcttttgcagttgcaaactgtggctggtgagtggcagtctaatactacagttaggggagatgccattcactctctgcaagaggagtattgaaaactggtggactgtcagctttatttagctcacctagtgttttcaagaaaattgagccaccgtctaagaaatcaagaggtttcacattaaaattagaatttctggcctctctcgattggtcagaatgtgtggcaattctgatctgcattttcagaagaggacaatcaattgaaactaagtaggggtttcttcttttggcaagacttgtactctctcacctggcctgtttcatttatttgtattatctgcctggtccctgaggcgtctgggtctctcctctcccttgcaggtttgggtttgaagctgaggaactacaaagttgatgatttcttttttatctttatgcctgcaattttacctagctaccactaggtggatagtaaatttatacttatgtttccctcaaaaaaaaaaaaaaaaaaaaaaaaaa

SEQ ID NO: 60 - protein, 226 aa, Homo sapiens
METVVIVAIGVLATIFLASFAALVLVCRQRYCRPRDLLQRYDSKPIVDLIGAMETQSEPSELELDDVVITNPHIEAILENEDWIEDASGLMSHCIAILKICHTLTEKLVAMTMGSGAKMKTSASVSDIIVVAKRISPRVDDVVKSMYPPLDPKLLDARTTALLLSVSHLVLVTRNACHLTGGLDWIDQSLSAAEEHLEVLREAALASEPDKGLPGPEGFLQEQSAI

SEQ ID NO: 61 - DNA, 1425 bp, Mouse
  CDS (89)...(766)
gcggggagccggcgtaccccggagctgcaattgagcttccacctgctcagaggatgtgagtggactgaggctgggagcccctggaagcatggagactgtggtgatcgtcgccataggtgtgctggccaccattttcctggcctcatttgctgctttggtggtggtctgtaggcagcgttactgccggcctcgagacctactacagcgttatgattccaagcccatcgtggacctcattggtgctatggagacgcagtctgaaccctccgagctggagctggatgatgtcgtcatcaccaacccccacatcgaggccatcctggagaatgaggactggatcgaagatgcctcgggcctcatgtcccactgcatcgccatcttgaagatttgtcacactctgacagaaaaactcgttgccatgacaatgggttctggggccaagatgaagacgtcagcaagtgtcagtgacatcattgtggtggccaaacggattagccccagagtggacgacgtcgtgaagtcaatgtaccctccactggaccccaagctcctggatgcacggacaaccgccctgctgctgtccgttagtcacttggtgctagtgaccaggaacgcctgccatctaaccgggggcctggactggattgaccaatcactgtctgccgctgaggagcacctggaagtccttcgagaggcagccctggcttctgagccagataaaagcctccccaaccctgagggcttcctgcaggaacagtcggccatttaatcatctccgaggccccatttccgcccctgggcgagccttctacttcctgtagatttagttgttctctagagctctgtcggccagccctgggtgcagggtaaagccgagagcctcacgctggacaggctctgctgcaatggcaaacagtggctggagagtggcagtgtaatcccacagttaggggagacgctgtgtacctctacagcagagcgcagaaagctgccgggctcgctgctacatttagttcatttaatgtttccaagaaaatcgagttgccctctaagaattgagagacttcatatcaaattagaatttccggcttctgaaaatcaaggcgtggcaacatggacaatcagaactaagtggctaggtcgagatagtctcttcgggtgacccttgtgctccccttgctaatttgtttgtgttcagtgctttggttcctgaagcatcagagctccccacccccaccccgcttcccatgtatcttccgctttcccatttgtgttagaagctgaggaaatgcgaagtcaattgtttcctttttatcactatgcctgcaatttcgctttacaaccaccaggcgaatagtaaacttgttcttctgttttcctcaaaaaaaaaaaaaaaaaaaaaaaaaaaaaaaaaaaaaaaaaaaa

SEQ ID NO: 62 - protein, 226 aa, Mouse
METVVIVAIGVLATIFLASFAALVVVCRQRYCRPRDLLQRYDSKPIVDLIGAMETQSEPSELELDDVVITNPHIEAILENEDWIEDASGLMSHCIAILKICHTLTEKLVAMTMGSGAKMKTSASVSDIIVVAKRISPRVDDVVKSMYPPLDPKLLDARTTALLLSVSHLVLVTRNACHLTGGLDWIDQSLSAAEEHLEVLREAALASEPDKSLPNPEGFLQEQSAI

SEQ ID NO: 63 - DNA, 1422 bp, Homo sapiens
  CDS (49)...(363)
gcgagaggcatctaagcaggcagtgttttgccttcaccccaagtgaccatgagaggtgccacgcgagtctcaatcatgctcctcctagtaactgtgtctgactgtgctgtgatcacaggggcctgtgagcgggatgtccagtgtggggcaggcacctgctgtgccatcagcctgtggcttcgagggctgcggatgtgcaccccgctggggcgggaaggcgaggagtgccaccccggcagccacaaggtccccttcttcaggaaacgcaagcaccacacctgtccttgcttgcccaacctgctgtgctccaggttcccggacggcaggtaccgctgctccatggacttgaagaacatcaatttttaggcgcttgcctggtctcaggatacccaccatccttttcctgagcacagcctggatttttatttctgccatgaaacccagctcccatgactctcccagtccctacactgactaccctgatctctcttgtctagtacgcacatatgcacacaggcagacatacctcccatcatgacatggtccccaggctggcctgaggatgtcacagcttgaggctgtggtgtgaaaggtggccagcctggttctcttccctgctcaggctgccagagaggtggtaaatggcagaaaggacattccccctcccctccccaggtgacctgctctctttcctgggccctgcccctctccccacatgtatccctcggtctgaattagacattcctgggcacaggctcttgggtgcattgctcagagtcccaggtcctggcctgaccctcaggcccttcacgtgaggtctgtgaggaccaatttgtgggtagttcatcttccctcgattggttaactccttagtttcagaccacagactcaagattggctcttcccagagggcagcagacagtcaccccaaggcaggtgtagggagcccagggaggccaatcagccccctgaagactctggtcccagtcagcctgtggcttgtggcctgtgacctgtgaccttctgccagaattgtcatgcctctgaggccccctcttaccacactttaccagttaaccactgaagcccccaattcccacagcttttccattaaaatgcaaatggtggtggttcaatctaatctgatattgacatattagaaggcaattagggtgtttccttaaacaactcctttccaaggatcagccctgagagcaggttggtgactttgaggagggcagtcctctgtccagattggggtgggagcaagggacagggagcagggcaggggctgaaaggggcactgattcagaccagggaggcaactacacaccaacctgctggctttagaataaaagcaccaactgaaaaaaaaaaaaaaaaaaaaaaaaaaaaaaaaaaaaaaaaaaaaaaaaaaaaaaa

SEQ ID NO: 64 - protein, 105 aa, Homo sapiens
MRGATRVSIMLLLVTVSDCAVITGACERDVQCGAGTCCAISLWLRGLRMCTPLGREGEECHPGSHKVPFFRKRKHHTCPCLPNLLCSRFPDGRYRCSMDLKNINF

SEQ ID NO: 65 - DNA, 2925 bp, Homo sapiens
  CDS (161)...(2494)
cgctggcattttctcctggacaaggagagagtgcggctgctgagagccgagcccagcaatcccgatcctctgagtcgtgaagaagggaggcagcgagggggttggggttggggcctgaggcaagcccccaggctccgctcttgccagagggacaggagccatggctcagaaaatggactgtggtgcgggcctcctcggcttccaggctgaggcctccgtagaagacagcgccttgcttatgcagaccttgatggaggccatccagatctcagaggctccacctactaaccaggccaccgcagctgctagtccccagagttcacagcccccaactgccaatgagatggctgacattcaggtttcagcagctgccgctaggcctaagtcagcctttaaagtccagaatgccaccacaaaaggcccaaatggtgtctatgatttctctcaggctcataatgccaaggatgtgcccaacacgcagcccaaggcagcctttaagtcccaaaatgctaccccaaagggtccaaatgctgcctatgatttttcccaggcagcaaccactggtgagttagctgctaacaagtctgagatggccttcaaggcccagaatgccactactaaagtgggcccaaatgccacctacaatttctctcagtctctcaatgccaatgacctggccaacagcaggcctaagacccctttcaaggcttggaatgataccactaaggccccaacagctgatacccagacccagaatgtaaatcaggccaaaatggccacttcccaggctgacatagagaccgacccaggtatctctgaacctgacggtgcaactgcacagacatcagcagatggttcccaggctcagaatctggagtcccggacaataattcggggcaagaggacccgcaagattaataacttgaatgttgaagagaacagcagtggggatcagaggcgggccccactggctgcagggacctggaggtctgcaccagttccagtgaccactcagaacccacctggcgcaccccccaatgtgctctggcagacgccattggcttggcagaacccctcaggctggcaaaaccagacagccaggcagaccccaccagcacgtcagagccctccagctaggcagaccccaccagcctggcagaacccagtcgcttggcagaacccagtgatttggccaaacccagtaatctggcagaacccagtgatctggccaaaccccattgtctggcccggccctgttgtctggccgaatccactggcctggcagaatccacctggatggcagactccacctggatggcagaccccaccgggctggcagggtcctccagactggcaaggtcctcctgactggccgctaccacccgactggccactgccacctgattggccacttcccactgactggccactaccacctgactggatccccgctgattggccaattccacctgactggcagaacctgcgcccctcgcctaacctgcgcccttctcccaactcgcgtgcctcacagaacccaggtgctgcacagccccgagatgtggcccttcttcaggaaagagcaaataagttggtcaagtacttgatgcttaaggactacacaaaggtgcccatcaagcgctcagaaatgctgagagatatcatccgtgaatacactgatgtttatccagaaatcattgaacgtgcatgctttgtcctagagaagaaatttgggattcaactgaaagaaattgacaaagaagaacacctgtatattctcatcagtacccccgagtccctggctggcatactgggaacgaccaaagacacacccaagctcggtctcctcttggtgattctgggtgtcatcttcatgaatggcaaccgtgccagtgaggctgtcctctgggaggcactacgcaagatgggactgcgtcctggggtgagacatcccctccttggagatctaaggaaacttctcacctatgagtttgtaaagcagaaatacctggactacagacgagtgcccaacagcaaccccccggagtatgagttcctctggggcctccgttcctaccatgagactagcaagatgaaagtgctgagattcattgcagaggttcagaaaagagaccctcgtgactggactgcacagttcatggaggctgcagatgaggccttggatgctctggatgctgctgcagctgaggccgaagcccgggctgaagcaagaacccgcatgggaattggagatgaggctgtgtctgggccctggagctgggatgacattgagtttgagctgctgacctgggatgaggaaggagattttggagatccctggtccagaattccatttaccttctgggccagataccaccagaatgcccgctccagattccctcagacctttgccggtcccattattggtcctggtggtacagccagtgccaacttcgctgccaactttggtgccattggtttcttctgggttgagtgagatgttgggtaggtacatcactttggattgggcagttagggtctctgggggatatagggtccatggggttgtatttatgtgcatgagctagaagtattaggaaactcattgtagggagatgaggaaagtatggggcagcactctttggtatgtatattccttattatttgatatatatcattgatttttttacttcttctttcttatgttcacagatattgctatcaatcgcagtagtctttcccctgtgtgaggctgaagcctcagattccttctaaacacagctatctagagagccacatcctgttgactgaaagtggcatgcaagataaatttatttgctgttccttgtctactgctttttttccccttgtgtgctgtcaagttttggtatcagaaataaacattgaaattgcaaagtgaaaaaa

SEQ ID NO: 66 - protein, 778 aa, Homo sapiens
MAQKMDCGAGLLGFQAEASVEDSALLMQTLMEAIQISEAPPTNQATAAASPQSSQPPTANEMADIQVSAAAARPKSAFKVQNATTKGPNGVYDFSQAHNAKDVPNTQPKAAFKSQNATPKGPNAAYDFSQAATTGELAANKSEMAFKAQNATTKVGPNATYNFSQSLNANDLANSRPKTPFKAWNDTTKAPTADTQTQNVNQAKMATSQADIETDPGISEPDGATAQTSADGSQAQNLESRTIIRGKRTRKINNLNVEENSSGDQRRAPLAAGTWRSAPVPVTTQNPPGAPPNVLWQTPLAWQNPSGWQNQTARQTPPARQSPPARQTPPAWQNPVAWQNPVIWPNPVIWQNPVIWPNPIVWPGPVVWPNPLAWQNPPGWQTPPGWQTPPGWQGPPDWQGPPDWPLPPDWPLPPDWPLPTDWPLPPDWIPADWPIPPDWQNLRPSPNLRPSPNSRASQNPGAAQPRDVALLQERANKLVKYLMLKDYTKVPIKRSEMLRDIIREYTDVYPEIIERACFVLEKKFGIQLKEIDKEEHLYILISTPESLAGILGTTKDTPKLGLLLVILGVIFMNGNRASEAVLWEALRKMGLRPGVRHPLLGDLRKLLTYEFVKQKYLDYRRVPNSNPPEYEFLWGLRSYHETSKMKVLRFIAEVQKRDPRDWTAQFMEAADEALDALDAAAAEAEARAEARTRMGIGDEAVSGPWSWDDIEFELLTWDEEGDFGDPWSRIPFTFWARYHQNARSRFPQTFAGPIIGPGGTASANFAANFGAIGFFWVE

SEQ ID NO: 67 - DNA, 1338 bp, Homo sapiens
gtcgacccacgcgtccgggactggggtgacggcagggcagggggcgcctggccggggagaagcgcgggggctggagcaccaccaactggagggtccggagtagcgagcgccccgaaggaggccatcggggagccgggaggggggactgcgagaggaccccggcgtccgggctcccggtgccagcgctatgaggccactcctcgtcctgctgctcctgggcctggcggccggctcgcccccactggacgacaacaagatccccagcctctgcccggggcaccccggccttccaggcacgccgggccaccatggcagccagggcttgccgggccgcgatggccgcgacggccgcgacggcgcgcccggggctccgggagagaaaggcgagggcgggaggcgggactgccgggacctcgaggggaccccgggccgcgaggagaggcgggacccgcggggcccaccgggcctgccggggagtgctcggtgcctccgcgatccgccttcagcgccaagcgctccgagagccgggtgcctccgccgtctgacgcacccttgcccttcgaccgcgtgctggtgaacgagcagggacattacgacgccgtcaccggcaagttcacctgccaggtgcctggggtctactacttcgccgtccatgccaccgtctaccgggccagcctgcagtttgatctggtgaagaatggcgaatccattgcctctttcttccagtttttcggggggtggcccaagccagcctcgctctcggggggggccatggtgaggctggagcctgaggaccaagtgtgggtgcaggtgggtgtgggtgactacattggcatctatgccagcatcaagacagacagcaccttctccggatttctggtgtactccgactggcacagctccccagtctttgcttagtgcccactgcaaagtgagctcatgctctcactcctagaaggagggtgtgaggctgacaacctggtcatccaggagggctggcccccctggaatattgtgaatgactagggaggtggggtagagcactctccgtcctgctgctggcaaggaatgggaacagtggctgtctgcgatcaggtctggcagcatggggcagtggctggatttctgcccaagaccagaggagtgtgctgtgctggcaagtgtaagtcccccagttgctctggtccaggagcccacggtggggtgctctcttcctggtcctctgcttctctggatcctccccaccccctcctgctcctggggccggcccttttctcagagatcactcaataaacctaagaaccctccaaaaaaaaaaaaaaaaaaaagggcggccgc

SEQ ID NO: 68 - protein, 243 aa, Homo sapiens
MRPLLVLLLLGLAAGSPPLDDNKIPSLCPGHPGLPGTPGHHGSQGLPGRDGRDGRDGAPGAPGEKGEGGRPGLPGPRGDPGPRGEAGPAGPTGPAGECSVPPRSAFSAKRSESRVPPPSDAPLPFDRVLVNEQGHYDAVTGKFTCQVPGVYYFAVHATVYRASLQFDLVKNGESIASFFQFFGGWPKPASLSGGAMVRLEPEDQVWVQVGVGDYIGIYASIKTDSTFSGFLVYSDWHSSPVFA

SEQ ID NO: 69 - DNA, 1263 bp, Mus musculus
gtcgacccacgcgtccgcgctgtgaagccagcaaggagcaaccagaagctaggagtcagtcagcaaggacaggggctgcctgcctacagactacaagagaggttcctggagtctgagcctccggggtcaccaccatgaggccacttcttgcccttctgcttctgggtctggtgtcaggctctcctcctctggacgacaacaagatccccagcctgtgtcccgggcagcccggccttccaggcacaccaggtcaccatggcagccaaggcctgcctggccgtgacggccgtgatggccgcgacggtgcacccggagctccgggagagaaaggcgagggcgggagaccgggactacctggcccacgtggggagcccgggccgcgtggagaggcagggcccatgggggctatcgggcctgcgggggagtgctcggtacccccacgatcagccttcagtgccaagcgatccgagagccgggtacctccgccagccgacacacccctacctttcgaccgtgtgctgctaaatgagcagggccattacgaccccactactggcaagttcacctgccaagtgcctggcgtctactactttgctgtgcacgccactgtctaccgggccagcttgcagtttgatcttgtcaaaaacgggcagtccatcgcctctttcttccagtattttggggggtggcccaagccagcctcgctctcagggggtgcgatggtaaggctagaacctgaggaccaggtgtgggtgcaggtgggcgtgggtgattacattggcatctatgccagcatcaagacagacagtaccttctctggatttctcgtctattctgactggcacagctccccagtcttcgcttaaaacacagtgaacccggagctggcacttgctcctcagtggagggtgtgacactaacccgcgcagcgcataccaggagggctggccccctggaatattgtgaatgacttaggaagagagggagccacttccagtcccactgctggcaatgaatggagacaggctgtctgaggtcaagacagcgtggagcagtggctgggtttctgcccaggactttagaatgcagtaggctggcagctgtgggtcctggcccaggactccaaggtgggatgctccattcctagtcctgtgtcccctctaggtccctgactccatctctgctgctcccagggcaggcctttttctcagaggtcacttaataaacctaaaatcctcaaaaaaaaaaaaaaagggcggccgc

SEQ ID NO: 70 - protein, 243 aa, Mus musculus
MRPLLALLLLGLVSGSPPLDDNKIPSLCPGQPGLPGTPGHHGSQGLPGRDGRDGRDGAPGAPGEKGEGGRPGLPGPRGEPGPRGEAGPMGAIGPAGECSVPPRSAFSAKRSESRVPPPADTPLPFDRVLLNEQGHYDPTTGKFTCQVPGVYYFAVHATVYRASLQFDLVKNGQSIASFFQYFGGWPKPASLSGGAMVRLEPEDQVWVQVGVGDYIGIYASIKTDSTFSGFLVYSDWHSSPVFA

SEQ ID NO: 71 - DNA, 1831 bp, Homo sapiens
gtcgacccacgcgtccgcggacgcgtgggtgaggggaagaggctgactgtacgttccttctactctggcaccactctccaggctgccatggggcccagcacccctctcctcatcttgttccttttgtcatggtcgggacccctccaaggacagcagcaccaccttgtggagtacatggaacgccgactagctgctttagaggaacggctggcccagtgccaggaccagagtagtcggcatgctgctgagctgcgggacttcaagaacaagatgctgccactgctggaggtggcagagaaggagcgggaggcactcagaactgaggccgacaccatctccgggagagtggatcgtctggagcgggaggtagactatctggagacccagaacccagctctgccctgtgtagagtttgatgagaaggtgactggaggccctgggaccaaaggcaagggaagaaggaatgagaagtacgatatggtgacagactgtggctacacaatctctcaagtgagatcaatgaagattctgaagcgatttggtggcccagctggtctatggaccaaggatccactggggcaaacagagaagatctacgtgttagatgggacacagaatgacacagcctttgtcttcccaaggctgcgtgacttcacccttgccatggctgcccggaaagcttcccgagtccgggtgcccttcccctgggtaggcacagggcagctggtatatggtggctttctttattttgctcggaggcctcctggaagacctggtggaggtggtgagatggagaacactttgcagctaatcaaattccacctggcaaaccgaacagtggtggacagctcagtattcccagcagaggggctgatccccccctacggcttgacagcagacacctacatcgacctggcagctgatgaggaaggtctttgggctgtctatgccacccgggaggatgacaggcacttgtgtctggccaagttagatccacagacactggacacagagcagcagtgggacacaccatgtcccagagagaatgctgaggctgcctttgtcatctgtgggaccctctatgtcgtctataacacccgtcctgccagtcgggcccgcatccagtgctcctttgatgccagcggcaccctgacccctgaacgggcagcactcccttattttccccgcagatatggtgcccatgccagcctccgctataacccccgagaacgccagctctatgcctgggatgatggctaccagattgtctataagctggagatgaggaagaaagaggaggaggtttgaggagctagccttgttttttgcatctttctcactcccatacatttatattatatccccactaaatttcttgttcctcattcttcaaatgtgggccagttgtggctcaaatcctctatatttttagccaatggcaatcaaattctttcagctcctttgtttcatacggaactccagatcctgagtaatccttttagagcccgaagagtcaaaaccctcaatgttccctcctgctctcctgccccatgtcaacaaatttcaggctaaggatgccccagacccagggctctaaccttgtatgcgggcaggcccagggagcaggcagcagtgttcttcccctcagagtgacttggggagggagaaataggaggagacgtccagctctgtcctctcttcctcactcctcccttcagtgtcctgaggaacaggactttctccacattgttttgtattgcaacattttgcattaaaaggaaaatccactgctaaaaaaaaaaaaaaaaaaaaaaaaaaaaagggcggccgc

SEQ ID NO: 72 - protein, 406 aa, Homo sapiens
MGPSTPLLILFLLSWSGPLQGQQHHLVEYMERRLAALEERLAQCQDQSSRHAAELRDFKNKMLPLLEVAEKEREALRTEADTISGRVDRLEREVDYLETQNPALPCVEFDEKVTGGPGTKGKGRRNEKYDMVTDCGYTISQVRSMKILKRFGGPAGLWTKDPLGQTEKIYVLDGTQNDTAFVFPRLRDFTLAMAARKASRVRVPFPWVGTGQLVYGGFLYFARRPPGRPGGGGEMENTLQLIKFHLANRTVVDSSVFPAEGLIPPYGLTADTYIDLAADEEGLWAVYATREDDRHLCLAKLDPQTLDTEQQWDTPCPRENAEAAFVICGTLYVVYNTRPASRARIQCSFDASGTLTPERAALPYFPRRYGAHASLRYNPRERQLYAWDDGYQIVYKLEMRKKEEEV

SEQ ID NO: 73 - DNA, 1721 bp, Mus musculus
gtcgacccacgcgtccgacttaaggctgccatggggcccagtgctcctctgctgctcctcttctttttgtcatggacgggaccccttcagggacagcagcaccaccttgtggagtacatggaacgccgactagctgccttagaggaacggctggcccaatgccaggatcagagtagtcggcatgctgccgagcttcgggacttcaaaaacaagatgttgcctctcctggaggtggcagagaaggagcgggagaccctcagaactgaagcagactccatctcaggaagagtggaccgtcttgaaagggaggtagactatctggagacacagaacccagctttgccctgtgtagagctggatgagaaggtgactggaggtcctggagccaaaggcaagggccgaagaaatgagaaatacgatatggtgacggactgtagctacacagtcgctcaggtgaggtcaatgaagatcctgaagcggtttggtggttcagttggcctatggaccaaggatccgctggggccagcagagaagatctacgtgttagacggcacccagaacgacacggcttttgtcttcccaaggctgcgtgacttcacccttgccatggctgcccggaaagcttcccgaattcgggtgcccttcccctgggtaggcacggggcagctggtgtacggtggcttcctttattatgctcgaaggcctcctggaggacctggagggggtggtgaattggagaacactctgcagctgatcaaatttcacttggcaaaccgaacagtggtggatagctcagtgttccctgcagagagcctgatacccccctacggcctgacagcagatacatatatcgacctggcagctgatgaggagggcctgtgggctgtctatgccactcgagatgatgacaggcatttgtgtctagccaagttagacccacagacacttgacacagagcagcagtgggacacaccatgtcccagagagaacgcagaggctgcgtttgtcatctgtgggaccctgtacgttgtctataacacccgccctgccagtagggctcgtattcagtgttccttcgatgccagtggtactctcgcccctgaaagggcagcactctcctattttccacgccgatatggtgcccatgccagccttcgctataacccccgtgagcgccagctgtatgcctgggatgatggctaccagattgtctacaaattggagatgaagaagaaggaggaggaagtttaagcagctagccttgtgctcttgattcttatgcccagacatttatattcctgtgagctctcctgcagttcatccttcaaaacgaaggccagtggtggtagctcatataccctaatttctaaaggacaaccaaattctcaagcccctctgttttatgcagaactccagatcctgggtagcattttagaactgaacagcaaacaaacaccctaaatcttcactcctgccttatgtccacaaagtttagttccaaactcagagccctgtcctttggagagggtcaaccccagacagcaggcgacagcattcttgccctcagtatgaccgaagggagagaactcagagacaaagctgccctccctcccttccccctccagtgtaggggagaatggggctttccccacatcactttgtatggtaacagtttgcattaaaaggaaaacccaccaaaaaaaaaaaaaaagggcggccgc

SEQ ID NO: 74 - protein, 406 aa, Mus musculus
MGPSAPLLLLFFLSWTGPLQGQQHHLVEYMERRLAALEERLAQCQDQSSRHAAELRDFKNKMLPLLEVAEKERETLRTEADSISGRVDRLEREVDYLETQNPALPCVELDEKVTGGPGAKGKGRRNEKYDMVTDCSYTVAQVRSMKILKRFGGSVGLWTKDPLGPAEKIYVLDGTQNDTAFVFPRLRDFTLAMAARKASRIRVPFPWVGTGQLVYGGFLYYARRPPGGPGGGGELENTLQLIKFHLANRTVVDSSVFPAESLIPPYGLTADTYIDLAADEEGLWAVYATRDDDRHLCLAKLDPQTLDTEQQWDTPCPRENAEAAFVICGTLYVVYNTRPASRARIQCSFDASGTLAPERAALSYFPRRYGAHASLRYNPRERQLYAWDDGYQIVYKLEMKKKEEEV

SEQ ID NO: 75 - DNA, 1869 bp, Homo sapiens
  modified_base all "n" positions: n=a, c, g, or t
gtcgacccacgcgtncntccagcgtncggagccgccctgggtgtcagcggctcggctcccgcgcacgctccggccgtcgcgcagcctcggcacctgcaggtccgtgcgtcccgcggctggcgcccctgactccgtcccggccagggagggccatgatttccctcccggggcccctggtgaccaacttgntgcggtttttgttcctggggctgagtgccctcgcgcccccctcgcgggcccagctgcaactgcacttgcccgccaaccggttgcaggcggtggaggagggggaaagtggtgcttcagcatggtacaccttgcacagggaggtgtcttcatcccagccatgggaggtgccctttgtgatgtggttcttcaaacagaaagaaaaggaggatcaggtgttgtcctacatcaatggggtcacaacaagcaaacctggagtatccttggtctactccatgccctcccggaacctgtccctgcgggtggagggtctccaggagaaagactctggcccctacagctgctccgtgaatgtgcaagacaaacaaggcaaatctaggggccacagcatcaaaaccttagaactcaatgtactggttcctccagctcctccatcctgccgtctccagggtgtgccccatgtgggggcaaacgtgaccctgagctgccagtctccaaggagtaagcccgctgtccaataccagtgggatcggcagcttccatccttccagactttctttgcaccagcattagatgtcatccgtgggtctttaagcctcaccaacctttcgtcttccatggctggagtctatgtctgcaaggcccacaatgaggtgggcactgcccaatgtaatgtgacgctggaagtgagcacagggcctggagctgcagtggttgctgaagctgttgtgggtaccctggttggactggggttgctggctgggctggtcctcttgtaccaccgccggggcaaggccctggaggagccagccaatgatatcaaggaggatgccattgctccccggaccctgccctggcccaagagctcagacacaatctccaagaatgggaccctttcctctgtcacctccgcacgagccctccggccaccccatggccctcccaggcctggtgcattgacccccacgcccagtctatccagccaggccctgccctcaccaagacatgcccacgacagatggggcccaccctcaaccaatatcccccatccctggtggggttttttcctttggctttgagccgcatgggtgctgngcctgtgatggngcctgcccagagtcaagctggctctctggtatgatgaccccaccactcattggctaaaggatttggggtctctccttcctataagggtcacctctagcacagaggcctgagtcatgggaaagagtcacactcctgacccttagtactctgcccccacctctctttactgtgggaaaaccatctcagtaagacctaagtgtccaggagacagaaggagaagaggaagtggatctggaattgggaggagcctccacccacccctgactcctccttatgaagccagctgctgaaattagctactcaccaagagtgaggggcagagacttccagtcactgagtctcccaggcccccttgatctgtaccccacccctatctaacaccacccttggctcccactccagctccctgtattgatataacctgtcaggctggcttggttaggttttactggggcagaggatagggaatctcttattaaaactaacatgaaatatgtgttgttttcatttgcaaatttaaataaagatacataatgtttgtatgagataagaaaaaaaaaaaaaaagggcggccgc

SEQ ID NO: 76 - protein, 370 aa, Homo sapiens
  SITE (13): Xaa=unknown amino acid
MISLPGPLVTNLXRFLFLGLSALAPPSRAQLQLHLPANRLQAVEEGESGASAWYTLHREVSSSQPWEVPFVMWFFKQKEKEDQVLSYINGVTTSKPGVSLVYSMPSRNLSLRVEGLQEKDSGPYSCSVNVQDKQGKSRGHSIKTLELNVLVPPAPPSCRLQGVPHVGANVTLSCQSPRSKPAVQYQWDRQLPSFQTFFAPALDVIRGSLSLTNLSSSMAGVYVCKAHNEVGTAQCNVTLEVSTGPGAAVVAEAVVGTLVGLGLLAGLVLLYHRRGKALEEPANDIKEDAIAPRTLPWPKSSDTISKNGTLSSVTSARALRPPHGPPRPGALTPTPSLSSQALPSPRHAHDRWGPPSTNIPHPWWGFFLWL

SEQ ID NO: 77 - DNA, 1846 bp, Mus musculus
gtcgacccacgcgtccggtgcacattcgggttgccgccgctcacccacaacacctgtagacaccgtgtgtccaactctccctgagtactccgggccaaggagggccatgattcttcaggctggaacccccgagaccagcttgctgcgggttttgttcctgggactgagtacccttgctgccttctcccgagctcagatggagttgcacgtgcccccgggcctcaacaaattggaagcggtagagggagaagaagtggtgctccccgcctggtacacgatggcacgggaggagtcgtggtcccacccccgggaggtgcccatcctgatctggttcttggaacaagaagggaaggaaccaaaccaggtgttgtcttacattaatggagtcatgacaaataaacctggaacagccctggtccactctatctcttcacggaatgtgtccctgcgcctgggggcactccaggagggagactctgggacttaccgctgttctgtcaatgtgcagaatgatgaaggcaaaagtataggccacagcatcaaaagcatagagctcaaagtgctggttcctccagctcctccatcctgtagtttacagggtgtaccctatgtcgggaccaatgtgaccctgaactgcaagtccccaaggagtaaacctactgctcagtaccagtgggagaggctggccccatcctcccaggtcttctttggaccagccttagatgctgttcgtggatctttaaagctcactaacctttccattgccatgtctggagtctatgtctgcaaggctcaaaacagagtgggctttgccaagtgcaacgtgaccttggacgtgatgacagggtccaaggctgcagtggtcgctggagcagttgtgggcacttttgttgggttggtgctgatagctgggctggtcctgttgtaccagcgccggagcaagaccttggaagagctggccaatgatatcaaggaagatgccattgctccccggaccttgccttggaccaaaggctcagacacaatctccaagaatgggacactttcttcggtcacctcagcacgagctctgcggccacccaaggctgctcctccaagacctggcacatttactcccacacccagtgtctctagccaggccctgtcctcaccaagactgcccagggtagatgaacccccacctcaggcagtgtccctgaccccaggtggggtttcttcttctgctctgagccgcatgggtgctgtgcctgtgatggtgcctgcacagagtcaggctgggtctcttgtgtgatagcccaggcactcattagctacatctggtatctgacctttctgtaaaggtctccttgtggcacagaggactcaatcttgggaggatgcccacattctagacctccagtcctttgctcctacctccttctattgttggaatactgggcctcagtaagactaaaatctgggtcaaaggacaaaaggaggaaatggacctgaggtagggggttgggagtgaggaggcttcacttcctccctgcttctccctgaagccagatgaatgctgcggaagatcggctaccctccaagggctctggaggagactgccagtcagtgatgcccctggctctgtgatctgtacaacacccttatctaatgctgtcctttgccgttcgctccatctccctgtattaatataacctgtcctgctggcttggctgggttttgttgtagcagggggataggaaagacattttaaaatctgacttgaaattgatgtttttgtttttattttgcaaatttcaataaagatacatcgcatttgcatggaaaaaaaaaaaaaaagggcggccgc

SEQ ID NO: 78 - protein, 394 aa, Mus musculus
MILQAGTPETSLLRVLFLGLSTLAAFSRAQMELHVPPGLNKLEAVEGEEVVLPAWYTMAREESWSHPREVPILIWFLEQEGKEPNQVLSYINGVMTNKPGTALVHSISSRNVSLRLGALQEGDSGTYRCSVNVQNDEGKSIGHSIKSIELKVLVPPAPPSCSLQGVPYVGTNVTLNCKSPRSKPTAQYQWERLAPSSQVFFGPALDAVRGSLKLTNLSIAMSGVYVCKAQNRVGFAKCNVTLDVMTGSKAAVVAGAVVGTFVGLVLIAGLVLLYQRRSKTLEELANDIKEDAIAPRTLPWTKGSDTISKNGTLSSVTSARALRPPKAAPPRPGTFTPTPSVSSQALSSPRLPRVDEPPPQAVSLTPGGVSSSALSRMGAVPVMVPAQSQAGSLV

SEQ ID NO: 79 - DNA, 3057 bp, Homo sapiens
  CDS (99)...(890)
gtcgacccacgcgtccgctcccgggccgcggccagccgaggatcagagcgcttgccccgggggtctgtcgcgtcgcaggcgccgccggagccctggccatgaggaccctgtggatggcgctgtgcgcgctgtcgcggctgtggcccggggcccaggccggctgcgccgaggccgggcgctgctgtcccggccgggaccccgcctgcttcgcccgcggctggaggctggacagggtctacgggacgtgtttctgcgaccaagcctgtcgcttcaccggggactgctgcttcgactacgacagggcgtgcccagctcgcccgtgcttcgtgggggaatggagcccctggagtggttgtgcagaccagtgcaagcctacaacccgtgtgcggaggcgctcggtgcagcaggagcctcagaacggcggggcgccctgcccacccctggaagagagagctggctgcctggagtactccaccccgcagggccaggactgcgggcacacctatgttcctgcctttataactacctccgcattcaacaaggagagaacacgacaagctacgtctccacactggtctacacacacagaggatgctggatactgtatggagtttaagacagagtccttgactcctcactgtgctctggaaaactggcccttgactagatggatgcagtatctccgagagggatacacggtgtgtgtggattgtcagcctccagctatgaactctgtgagccttcgttgttctggagatggcctggactccgatggaaatcagactctccattggcaagcaattggtaatcctcggtgtcaaggaacttggaaaaaagttcggcgagtagaccagtgttcttgtccagctgttcacagttttatttttatatagatggtgatataaatatttccaaatgcatttgtaaacattctaaatattctcaagtcatgttcaatgtttcctaaaccttcaattttggccaaagtccccaaacacatcattgccacactctgaagtagagaaagaaaatttaggggccagttctcaaggaacacaggtcctttatttttattttaactaagttgaagacccactcaaaaagctcttgtggttttatgttcttgacctttcaactggagtcctctcattcagcaggtggcccgtgagacacagaatacatgtctgtttgctaaagtaaaattactgtaactcagtccgattattggtgacggaagtgtcatttaaggggatctatgttttgaaccttgcagtctattttataatcttttaaaagtttctcactttaaaacatgtatacaggtatgcacactctacacatatatttccatatatttaatattccataaattctgaaataatttcaagcaaattatcacaaataatttttccacagggcaaattatttaaaattttagtaagcattctgtaatgaaaaaccaagttatactaaaaacattttttgaagaagaaattttttttttgcttaagaagtgaaaggatcaaatgctcattgtaggtcaatgggagttcttttaaatgttataattttcatgaaaagaaatgttgacaccagtgaatgaaacaattgctttcattctgaaaattctaccaccatttgcatctaagattatttccaaggcttaaagcctgaagctgaataaaataatctttcagagtccagcttcaagtttagttgatgtaagctcactatttttttcctaccgcatgcattttctaatgtttggggtggatggtgtgtcggttatggaaggcatagacgtcattacaggtgctacgatctcacacacacacaaggaaatgttagtctccttattttatgattggaaaatcaatgacctagaggcaaaatggcatgtttaaggacctgggatgacaagtcattctgcagtcagccacagagccaaatttggactcctcaaccagaactccatgaaaagcctgactttgccaaacactgtgctggaaaagctaagcccctttcatttgtgaagtaaattttaaattcaagatatttagtttagagaattgagtcttgagatgtaaactacatgagatttctttggtttcaattgaataatattcactaacaaatgatttactaaaatacgtatttcttggtccttatcatgtaatgacagattcacaacagcaataaggatggagatttccccaataattaataacaccgagagtagcaatattttttactgtattttcatttaattgtcaaagttgtttttgtggaaaattaaattcttcagaaattaataataaaatatgtgagtctcatcaaggctagcaactttaagtcagtattaacattttcatactgtttctaacatttattaagctagatttttgaagctatgtctgggtaatttccaatgttacttaaaagtttttttttctttgagacagagtctcactctgttgcccaggctggagtgcagtggccccatctcggctcactgcaagctccgcctcccgggttcacgccattcttctgcctcagcctcccaagtagctgggactacaggcgccgtcatcacgcctggctaattttttgttttttttttttagtagagacagggtttcactgtgttagccagggtggtctcgatctcctgacctcgtgatccacccacctcggcctcccaaggtgctgggattatgggcgtgagccactgcgcctggcctgttacttaaaatttttatactagtaaataaactttttgttcacatttataaaagctctatatttgtttgactagaaaataacccaaattttctggaccagtcagagaatgataaaatttcaccaaaaataaaacaaaaaaatccttcagaactgataggtataggtacaacaactactaatagcaataaagcaatggtgcttttatagttccgatatgtgttataacatttaacataattgaggtgtataaaataaatttttcaccttatgcatttaaaaaaaaaaaaaaaaaaaaaaaaaaaaaagggcggccgc

SEQ ID NO: 80 - protein, 264 aa, Homo sapiens
MRTLWMALCALSRLWPGAQAGCAEAGRCCPGRDPACFARGWRLDRVYGTCFCDQACRFTGDCCFDYDRACPARPCFVGEWSPWSGCADQCKPTTRVRRRSVQQEPQNGGAPCPPLEERAGCLEYSTPQGQDCGHTYVPAFITTSAFNKERTRQATSPHWSTHTEDAGYCMEFKTESLTPHCALENWPLTRWMQYLREGYTVCVDCQPPAMNSVSLRCSGDGLDSDGNQTLHWQAIGNPRCQGTWKKVRRVDQCSCPAVHSFIFI

SEQ ID NO: 81 - DNA, 1294 bp, Mus musculus
  CDS (81)...(872)
gtcgacccacgcgtccgcggacgcgtgggtgcccgaggctctagctgggtccgttcgcaagtgtcgcggcagctctggccatgaagaccctgtggatggtgctgtgcgctctggcgcggctgtggcccggggccctggctggctgtgcagaggccggccgctgctgtcctggccgggacccagcctgcttcgcccgcggctggaggctggacagggtctatggaacatgcttctgtgaccaagcctgccgtctcaccggggactgctgcttcgactacgacagggcgtgcccagctcgcccttgctttgtgggagaatggagtccctggagtggctgcgcaggtcagtgccagcccaccacgcgtgtgcgcaggcgttcagtgcgtcaggaaccactaaacggaggggcgccctgcccacccctggaagagagagctggctgcctggagtactcgtcatcacagagccaggactgcgggcactcctttgttcctgccttcataactagctctgtcttcaacaagaagagaataatacaagcagtatctccacagtggtctacacacactaaggatgctggatactgtatggagttcaagacagagtccctgactcctcactgtgctctggtcaacagtcccctgactcgatggatgcagtatctccgtgagggatacacagtgtgtgtagactgtcagccaccagctatgaactctgtgagcctacgttgttctggagatggtctggactctgatggaaatcagactcttcgctggcaagccattggcaatcctcgatgtcagggaacctggaaaaaagtgcgtcgagtagaacagtgctcatgtccagatgtgcaccgcttcatttttatatagagcacctgggagcgacttccgagcatgcgtgtgaatgggccgagtattgacaagctgcattcaaagcttccgaggcctccaaaagctgcgccagggacctggactctcgcattgctacgctttgccactgagaaagaacatttagggatagttctcaaggtagaccacagtctcttggtttttatttttaatgagttaaggactcgtactaaaagctcctatggcctgtagacttttaccttacatttggtcacagcatacatgtctatactagaatcactaccatgtgctccagtttggggcaaattgttgtttaaggcacctatgttttctctttctctcaccctccctcttttaaaaattaaaggttctcattatatagcctgaagttcaaaaaaaaaaaaaaaaagggcggccgc

SEQ ID NO: 82 - protein, 264 aa, Mus musculus
MKTLWMVLCALARLWPGALAGCAEAGRCCPGRDPACFARGWRLDRVYGTCFCDQACRLTGDCCFDYDRACPARPCFVGEWSPWSGCAGQCQPTTRVRRRSVRQEPLNGGAPCPPLEERAGCLEYSSSQSQDCGHSFVPAFITSSVFNKKRIIQAVSPQWSTHTKDAGYCMEFKTESLTPHCALVNSPLTRWMQYLREGYTVCVDCQPPAMNSVSLRCSGDGLDSDGNQTLRWQAIGNPRCQGTWKKVRRVEQCSCPDVHRFIFI

SEQ ID NO: 83 - DNA, 1840 bp, Homo sapiens
  CDS (99)...(1358)
gtcgacccacgcgtccgagacggcccacggcgcccgcgggctggggcggtcgcttcttccttctccgtggcctacgagggtccccagcctgggtaaagatggccccatggcccccgaagggcctagtcccagctgtgctctggggcctcagcctcttcctcaacctcccaggacctatctggctccagccctctccacctccccagtcttctcccccgtctcagccccatccgtgtcatacctgccggggactggttgacagctttaacaagggcctggagagaaccatccgggacaactttggaggtggaaacactgcctgggaggaagagaatttgtccaaatacaaagacagtgagacccgcctggtagaggtgctggagggtgtgtgcagcaagtcagacttcgagtgccaccgcctgctggagctgagtgaggagctggtggagagctggtggtttcacaagcagcaggaggccccggacctcttccagtggctgtgctcagattccctgaagctctgctgccccgcaggcaccttcgggccctcctgccttccctgtcctgggggaacagagaggccctgcggtggctacgggcagtgtgaaggagaagggacacgagggggcagcgggcactgtgactgccaagccggctacgggggtgaggcctgtggccagtgtggccttggctactttgaggcagaacgcaacgccagccatctggtatgttcggcttgttttggcccctgtgcccgatgctcaggacctgaggaatcaaactgtttgcaatgcaagaagggctgggccctgcatcacctcaagtgtgtagacattgatgagtgtggcacagagggagccaactgtggagctgaccaattctgcgtgaacactgagggctcctatgagtgccgagactgtgccaaggcctgcctaggctgcatgggggcagggccaggtcgctgtaagaagtgtagccctggctatcagcaggtgggctccaagtgtctcgatgtggatgagtgtgagacagaggtgtgtccgggagagaacaagcagtgtgaaaacaccgagggcggttatcgctgcatctgtgccgagggctacaagcagatggaaggcatctgtgtgaaggagcagatcccagagtcagcaggcttcttctcagagatgacagaagacgagttggtggtgctgcagcagatgttctttggcatcatcatctgtgcactggccacgctggctgctaagggcgacttggtgttcaccgccatcttcattggggctgtggcggccatgactggctactggttgtcagagcgcagtgaccgtgtgctggagggcttcatcaagggcagataatcgcggccaccacctgtaggacctcctcccacccacgctgcccccagagcttgggctgccctcctgctggacactcaggacagcttggtttatttttgagagtggggtaagcacccctacctgccttacagagcagcccaggtacccaggcccgggcagacaaggcccctggggtaaaaagtagccctgaaggtggataccatgagctcttcacctggcggggactggcaggcttcacaatgtgtgaatttcaaaagtttttccttaatggtggctgctagagctttggcccctgcttaggattaggtggtcctcacaggggtggggccatcacagctccctcctgccagctgcatgctgccagttcctgttctgtgttcaccacatccccacaccccattgccacttatttattcatctcaggaaataaagaaaggtcttggaaagttaaaaaaaaaaaaaaaaaaaagggcggccgc

SEQ ID NO: 84 - protein, 420 aa, Homo sapiens
MAPWPPKGLVPAVLWGLSLFLNLPGPIWLQPSPPPQSSPPSQPHPCHTCRGLVDSFNKGLERTIRDNFGGGNTAWEEENLSKYKDSETRLVEVLEGVCSKSDFECHRLLELSEELVESWWFHKQQEAPDLFQWLCSDSLKLCCPAGTFGPSCLPCPGGTERPCGGYGQCEGEGTRGGSGHCDCQAGYGGEACGQCGLGYFEAERNASHLVCSACFGPCARCSGPEESNCLQCKKGWALHHLKCVDIDECGTEGANCGADQFCVNTEGSYECRDCAKACLGCMGAGPGRCKKCSPGYQQVGSKCLDVDECETEVCPGENKQCENTEGGYRCICAEGYKQMEGICVKEQIPESAGFFSEMTEDELVVLQQMFFGIIICALATLAAKGDLVFTAIFIGAVAAMTGYWLSERSDRVLEGFIKGR

SEQ ID NO: 85 - DNA, 2093 bp, Mus musculus
  CDS (332)...(1591)
gtcgacccacgcgtccgcctctctctaattttggcccctaataactcactgagaccctaaaacaatgggctgacgcttattcttttgcccgcgatcccggccacctccccctacggtaacggagaaataatttctctgctggaatcgtagattaggctctttcaccccttccagcgcctctgcttccactaccccagtttatcctcgttttgtaattacgtaggtctggggctctgagccccaaggcgcctcgctttcctcccttacagcctggcttctccagtgaaccctccccctgccctctatctgcacgtccccagcctgggaaaagatggctccactgcccccaaggggcctggtcccatctctgctctggtgcttgagcctgtttctgagcctcccaggacctgtctggctccaaccctctcctcctccccatccttctccccgagctgagccccatccgtgtcatacctgccgggcactggtggacaacttcaacaagggcctggagagaaccatccgggacaacttcgggggtggaaacacggcctgggaggaagagaagttgtccaaatacaaagacagtgagacccgcctggtggaggtgctggagggcgtgtgcagcaggtcagacttcgagtgccaccgcctgctcgagctgagcgaggagctggtggaaaactggtggtttcacaggcagcaggaagcccccgacctcttccagtggctctgttccgattccctgaagctctgctgcccctctggcacctttgggccctcctgcctgccatgtcctgggggcacagagaggccctgcggtggctacgggcagtgtgaaggggaagggactcgagggggcagcgggcactgtgactgccaagccggctatgggggcgaggcctgtggccagtgtggccttggctactttgaggcggagcgcaacagcagccatctggtatgttcggcgtgttttggtccttgtgcccgctgcacgggacctgaggaatcccattgtctgcagtgcaagaaaggctgggccctgcatcacctcaagtgtgtagacatcgatgagtgtggtacagagcaagccacctgtggagctgaccagttctgtgtgaacacagaaggatcctacgagtgccgagactgtgcaaaggcctgcctgggctgtatgggagcagggccagggcgctgcaaaaagtgcagccgtggctaccagcaggtgggctccaagtgcctagatgtggatgagtgtgagactgtggtgtgtccaggagagaatgagaagtgtgaaaacacggagggaggctaccgctgtgtctgtgctgagggctacagacaggaggacggcatctgcgtgaaggagcaggtcccggagtcggcgggcttctttgcggagatgacggaggatgaaatggtggttctgcagcagatgttctttggtgtaatcatctgtgcgctggccacgcttgctgccaagggtgacttggtgttcactgccatcttcattggagctgtggcagccatgactgggtactggttgtcagagcggagtgaccgtgtgctggagggcttcatcaagggtagataatccctgccgccactcacaggatttcctcccacccaggctgctcctagaggttatttctctctccctatggatacctgggacagcatagtttctctttgagactggggtaaacacccttttacctgccttactgagcagcccaggaccccagtggccccagggggttgaaaaagaggtcctgaagcagatgccacgagatcctagcctaggacactggcaggcctcaccgtgtatgaatcccaagacagtttctccccagggaggttgcaggtgggctttggcccctgacccggatgagaggtgtcccctcaggggtgggcccccataggccccttgccaggtgcatgctgccagctccagctgtgtattcaccgcccacgccctagccatcgacttatttattcatctcaggaaataaaggacggtcttgaaaatggaaaaaaaaaaaaaaaaaaaaaaaaaaaaaaaaaaaaaaaaaaaaaaaaaaaagggcggccgc

SEQ ID NO: 86 - protein, 420 aa, Mus musculus
MAPLPPRGLVPSLLWCLSLFLSLPGPVWLQPSPPPHPSPRAEPHPCHTCRALVDNFNKGLERTIRDNFGGGNTAWEEEKLSKYKDSETRLVEVLEGVCSRSDFECHRLLELSEELVENWWFHRQQEAPDLFQWLCSDSLKLCCPSGTFGPSCLPCPGGTERPCGGYGQCEGEGTRGGSGHCDCQAGYGGEACGQCGLGYFEAERNSSHLVCSACFGPCARCTGPEESHCLQCKKGWALHHLKCVDIDECGTEQATCGADQFCVNTEGSYECRDCAKACLGCMGAGPGRCKKCSRGYQQVGSKCLDVDECETVVCPGENEKCENTEGGYRCVCAEGYRQEDGICVKEQVPESAGFFAEMTEDEMVVLQQMFFGVIICALATLAAKGDLVFTAIFIGAVAAMTGYWLSERSDRVLEGFIKGR

SEQ ID NO: 87 - DNA, 3117 bp, Homo sapiens
  CDS (194)...(1531)
gtcgacccacgcgtccgcctctgggtgcctgcaggggagctgctccagccgggccgccgggagcggtggggagagcatcgcggagccgcccctccacgcgcccgcccagccgcgctcgcccactgggctctcccggctgcagtgccagggcgcaggacgcggccgatctcccgctcccgccacctccgccaccatgctgctcccccagctctgctggctgccgctgctcgctgggctgctcccgccggtgcccgctcagaagttctcggcgctcacgtttttgagagtggatcaagataaagacaaggattgtagcttggactgtgcgggttcgccccagaaacctctctgcgcatctgacggaaggaccttcctttcccgttgtgaatttcaacgtgccaagtgcaaagatccccagctagagattgcatatcgaggaaactgcaaagacgtgtccaggtgtgtggccgaaaggaagtatacccaggagcaagcccggaaggagtttcagcaagtgttcattcctgagtgcaatgacgacggcacctacagtcaggtccagtgtcacagctacacgggatactgctggtgcgtcacgcccaacgggaggcccatcagcggcactgccgtggcccacaagacgccccggtgcccgggttccgtaaatgaaaagttaccccaacgcgaaggcacaggaaaaacagatgatgccgcagctccagcgttggagactcagcctcaaggagatgaagaagatattgcatcacgttaccctaccctttggactgaacaggttaaaagtcggcagaacaaaaccaataagaattcagtgtcatcctgtgaccaagagcaccagtctgccctggaggaagccaagcagcccaagaacgacaatgtggtgatccctgagtgtgcgcacggcggcctctacaagccagtgcagtgccacccctccacggggtactgctggtgcgtcctggtggacacggggcgccccattcccggcacatccacaaggtacgagcagccgaaatgtgacaacacggccagggcccacccagccaaagcccgggacctgtacaagggccgccagctacaaggttgtccgggtgccaaaaagcatgagtttctgaccagcgttctggacgcgctgtccacggacatggtccacgccgcctccgacccctcctcctcgtcaggcaggctctcagaacccgaccccagccataccctagaggagcgggtggtgcactggtacttcaaactactggataaaaactccagtggagacatcggcaaaaaggaaatcaaacccttcaagaggttccttcgcaaaaaatcaaagcccaaaaaatgtgtgaagaagtttgttgaatactgtgacgtgaataatgacaaatccatctccgtacaagaactgatgggctgcctgggcgtggcgaaagaggacggcaaagcggacaccaagaaacgccacacccccagaggtcatgctgaaagtacgtctaatagacagccaaggaaacaaggataaatggctcataccccgaaggcagttcctagacacatgggaaatttccctcaccaaagagcaattaagaaaacaaaaacagaaacacatagtatttgcactttgtactttaaatgtaaattcactttgtagaaatgagctatttaaacagactgttttaatctgtgaaaatggagagctggcttcagaaaattaatcacatacaatgtatgtgtcctcttttgaccttggaaatctgtatgtggtggagaagtatttgaatgcatttaggcttaatttcttcgccttccacatgttaacagtagagctctatgcactccggctgcaattgtatggctttctctaacccctgcagtcacttccagatgcctgtgcttacagcattgtggaatcatgttggaagctccacatgtccatggaagtttgtgatgtacggccgaccctacaggcagttaacatgcatgggctggtttgtttcttgggattttctgttagtttgtcttgttttgctttccagagatcttgctcatacaatgaatcacgcaaccactaaagctatccagttaagtgcaggtagttcccctggaggaaataatattttcaaactgtcgttggtgtgatactttggctcaaaggatctttgcttttccattttaagcttctgttttgagttttgccctggggcttgaatgagtcccagagagtcgttcggatggtgggaggctgcctaggaggcagtaaatccagtcacagtgcctgggaggggcccatccttccaaaatgtaaatccagtcgcggtgtgaccgagctggctaacaggcttgtctgcctggttttcctcctacacgtggacattattctcctgatcctcctacctggtccaccccagggctaccggaaggtaaaatcttcacctgaaccaattatgagcagtctccttactgaaggtacagccggatacgtggtgcccccggggctggtgttggcagccggggggaggtgcctgagggtccccacggttcctttctgcttttctgaatgcatcaagggtacgagaacttgccaatgggaaattcatccgagtggcactggcagagaaggataggagtggaatgcccacacagtgaccaacagaactggtctgcgtgcataaccagctgccaccctcaggcctgggccccagagctcagggcacccagtgtcttaaggaaccatttggaggacagtctgagagcaggaacttcaagctgtgattctatctcggctcagacttttggttggaaaaagatcttcatggccccaaatcccctgagacatgccttgtagaatgattttgtgatgttgtgatgcttgtggagcatcgcgtaaggcttcttgcttatttaaactgtgcaaggtaaaaatcaagcctttggagccacagaaccagctcaagtacatgccaatgttgtttaagaaacagttatgatcctaaactttttggataatcttttatatttctgacctttgaatttaatcattgttcttagattaaaataaaatatgctattgaaactaaaaaaaaaaaaaaaaaaaagggcggccgc

SEQ ID NO: 88 - protein, 446 aa, Homo sapiens
MLLPQLCWLPLLAGLLPPVPAQKFSALTFLRVDQDKDKDCSLDCAGSPQKPLCASDGRTFLSRCEFQRAKCKDPQLEIAYRGNCKDVSRCVAERKYTQEQARKEFQQVFIPECNDDGTYSQVQCHSYTGYCWCVTPNGRPISGTAVAHKTPRCPGSVNEKLPQREGTGKTDDAAAPALETQPQGDEEDIASRYPTLWTEQVKSRQNKTNKNSVSSCDQEHQSALEEAKQPKNDNVVIPECAHGGLYKPVQCHPSTGYCWCVLVDTGRPIPGTSTRYEQPKCDNTARAHPAKARDLYKGRQLQGCPGAKKHEFLTSVLDALSTDMVHAASDPSSSSGRLSEPDPSHTLEERVVHWYFKLLDKNSSGDIGKKEIKPFKRFLRKKSKPKKCVKKFVEYCDVNNDKSISVQELMGCLGVAKEDGKADTKKRHTPRGHAESTSNRQPRKQG

SEQ ID NO: 89 - DNA, 2810 bp, Mus musculus
  CDS (187)...(1527)
gtcgacccacgcgtccgggagcgccggccagagcgcacggaggggccgtgcggtctccaccagcggccataggaccgcggagcagttctagcccgctcgcccgcacgttcgcacaccggatcttcgccgagtgccagggcgcagcgcgtggggcgtctgcctcgcttggtcccctccagcgtcaccatgctgccgccacagctgtgctggctgccgctgctcgctgccttgctgccgccggtgcccgcgcagaagttctcagcgctcacgttcttgagagtcgatcaagacaaagacagagactgcagcctggactgcccaagctcccctcagaagccactctgtgcctcggacgggaggaccttcctgtcccgatgtgagttccagcgggccaagtgcaaagatccacagctggagatcgctcaccgtgggaattgcaaagatgtgtccaggtgtgtggctgagaggaagtatacccaggagcaggcccggaaggagttccagcaagtgttcattccagaatgcaatgatgacggcacctacagtcaggtccagtgtcacagctacacaggatactgttggtgtgttacaccaaatggaagacccatcagtggcactgctgtggcccacaagacacccaggtgccccggttcaataaatgaaaaggtgccgcagcgggaaggagcagggaaagcagatgatgctgcagccccagcattggagactcagccccaaggagatgaagaagatattgcctcacgctaccctacactctggaccgagcaagttaagagtcggcagaacaagaccaataaaaattcagcatcctcctgtgatcaggagcatcagtcagctcttgaggaagccaagcagcccaagaatgacaatgtagtgatccccgagtgtgcacatggtggtctctacaagccagtgcaatgccatccatccaccggatactgctggtgtgtgctagtggacactggacggcccattcccgggacctccacaaggtatgagcaacctaagtgtgacaacacagcccgagctcacccagcgaaggcccgggacctgtacaagaacaggccactgcagggttgtcctggtgccaaaaagcacgagtttctgacaagtgtcctggatgcgctctccacagacatggttcatgccgtctctgacccctcttcctcttctggcaggctgtcagagccagaccccagccacaccctggaggagagggttgtacattggtacttcaagctgcttgataagaactctagtggagacattggcaagaaggagatcaaaccctttaagaggttcctgcgaaagaaatccaagcccaaaaagtgtgtgaagaagtttgtggagtactgcgacatgaacaatgacaagtccatcaccgtgcaggagctcatgggctgcttgggtgtcaccagagaggagggtaaagccaacaccaggaagcgccacacccccagaggaaatgctgaaagttcttcttctaatagacagcccaggaaacaaggatgaacggctgactactcaagacagttcctagacatgtgggaattttccctcaccaaagagcaattaaaaacaaaaaacatatagtatttgcactttgtactttaaatgtaaattcactttgtagaaatgagatatttaaacggactgttgtgatctgtgaaaacggaaggctggcttcgggaaattaatcacatacaatgtatgtgtccttgtttgaccttcaagatctgtgctggtggggtgggttttaaatgcatttcaacttcacttcctcgtccctctgtggagggcctggtttattcccttgccctttcctctgcctgcagtctccgttggcttgctctccgtgctcttgatgccagccagagcctaccgtatccttagaagcttgcagtggttgcctgtttcataaagttttgctctctagagatgtcactcacaccatgggtcacacaggcactagctcaggcatagccttaacttccagtagcccctgcttgagactatgctgttaggctccagttttagcttctgcttgagccaaccctactgttaaatccccggggagctgaatggacaagcagccagagagtcctctttcagagagcacatctaactctggcctgccgactccatctcattggcccaggaaggatccagtctacctgcctcacttctgagtgcctgggccatcctgctagggtccactggaaaggaaaaatgccttctacagagatcatggaccacatcctgaggaaggcacagctagactacatcgtcccaagagtgctgaacaacaggcagctgagaatgtcaatttcattttgtggaggcatcgggtttgagggaattcacccaaggccactatgggatgaaggttatgaactggatgaccatactgtgagagactgaactagattgggtgtatggctggctgtcactttctgacctaggtcagtctgtactctctgttctcaaggaacagtggcagatgggaggagagctggggcaattctttcagattgtggtttatatgggaaattgttcatggtccccagcctctcaatgtatgtctgtagatgcattgtgaacgcatgctgcagaaggcctttgctcatttgaactgtgtagaggcaagaagtgaccggctcatgtcaatgctgtctacaaacgagtatgatcctaactgttttggataatcttttatatttctgaactctgaatttaatcattttattagattaaaatatgcgattaaaaaaaaaaaaaaaagggcggccgct

SEQ ID NO: 90 - protein, 447 aa, Mus musculus
MLPPQLCWLPLLAALLPPVPAQKFSALTFLRVDQDKDRDCSLDCPSSPQKPLCASDGRTFLSRCEFQRAKCKDPQLEIAHRGNCKDVSRCVAERKYTQEQARKEFQQVFIPECNDDGTYSQVQCHSYTGYCWCVTPNGRPISGTAVAHKTPRCPGSINEKVPQREGAGKADDAAAPALETQPQGDEEDIASRYPTLWTEQVKSRQNKTNKNSASSCDQEHQSALEEAKQPKNDNVVIPECAHGGLYKPVQCHPSTGYCWCVLVDTGRPIPGTSTRYEQPKCDNTARAHPAKARDLYKNRPLQGCPGAKKHEFLTSVLDALSTDMVHAVSDPSSSSGRLSEPDPSHTLEERVVHWYFKLLDKNSSGDIGKKEIKPFKRFLRKKSKPKKCVKKFVEYCDMNNDKSITVQELMGCLGVTREEGKANTRKRHTPRGNAESSSSNRQPRKQG

SEQ ID NO: 91 - DNA, 3284 bp, Homo sapiens
  CDS (1222)...(1944)
gtcgacccacgcgtccgttatgtaactatacattttcccagaaattttagtatatgatatgattttgttttctttcatcccttttcccaagcagtttattatgaaaattttcaaacatacagcaatgttgagaaaattttacagtaaatgcctatacccattacctaaattttaccattaacattttaccctgctggcattattgtgcttatccatctacgtatccctctctcccttcattggtgtatttctaagtaaattgtaggcctcagtacacttccttctgaattcttcagcatgcacaacagtattatattccatttttaaaagagcaattcttgatagatttatatagttttgtaaaatgttcatatagagctacaaattttatctttttgtttcttattgtatgtctagggtcctgaaggggatgctggcattgttgggatatcaggtcctaaaggtcctattggacacagaggaaacactggtccccttggcagagaaggtataataggcccaacaggtagaactggacccagaggtgaaaagggctttagaggtgaaactggtcctcaaggaccaagaggtcaaccagggcctccaggtccacctggagcaccaggcccaagaaagcaaatggatatcaatgctgctattcaagccttgattgaatcaaatactgccctacagatggaggtaacatatctggttttatttatattggcactgtctctcaatataccaattaaacagagaaaatttttggaggccaaaatgtgacattatctcaaagattgtatttaaaacagattgaaaatgtgaaaccattctcaagaacaaagtaagtgattttggtataattaaacagaaatatatgcgtaggatgttttgtaaggaaaacatttaaatcaaaaatttagtactgttatttgtaaggaatttggtactatccaagaaagtagttaaatgaggttagccatgtttcttaaaatgagatatatatattatcactactcatttatttaaactctaatgattcaatgtgtaatttaaaaaacataatacagtagacatagcaattcttatgttagcttgaaaactaaacttgcaaatgtgaatttaacctctttaaaagattaaggttattaaagcatacacatatgcctatgcttaaatataaactgttctttacattctactcacaacttactacacataatggaaacacattcttctcctgccttggcccatgttggtcctcaggatttttttgtttatataattcttatgatgacttggcagagctaccagaatactgaagtgactttaattgaccacagtgaagagatattcaaaaccctgaactaccttagcaatttattgcacagcatcaagaatcctcttggcacacgagataacccagcacgaatctgcaaagatttacttaactgtgaacaaaaagtatcagatggaaaatactggattgacccaaatcttggctgtccttcagatgccattgaggttttctgcaatttcagtgctggtggccagacatgcttacctcctgtttctgtaacaaagttggagtttggagttgggaaagtccagatgaacttccttcatttactgagttcggaagccacccatatcatcaccattcactgtctaaacaccccaaggtggacaagcacacaaacaagtggcccaggattgcctattggtttcaagggatggaatggccagatttttaaagtaaacactctacttgaacctaaagtgctttcagatgactgcaagattcaagatggcagctggcataaggcaacatttctttttcacacccaggaacctaatcaacttccagtgattgaagtacaaaaacttcctcatctcaaaactgaacgaaagtattacattgacagcagttctgtatgctttctgtaaagtctctgaattagttccgaattcaggctgttggccaggtaattgctgcagagggagaaataagacagacagatacagtcattatgaaatgcatgtaataaagcattggctaaatcttaaagaatctcaggaagaacagacttcctcctaagaaggagaaaaggcatttttaaaggactatgattgataaagtatttaattcttttaaaaattatattcatctcagctttcttagagaattccctagaactaaaaatttataaatatggaattcttcagggtatcttatatttttgactgagtgcgtagtacccattagacagctggagatgcagagcactatggagcaatactggctaatgcttccagatgtgcactgcttctgtctaaaaattacaagccacagtctaatatgtcttattttccaaaacactaagctgtattcaggtccccgatgggcatatacatcttagccggtgatacactacctcttacgtgttgcctctttgtgttgcttggtgctctttcgaaaacaaggtgcttatggctttcatagactatttcctttttcatctttgtcattctttaaaagtgtatgtactggttacatcaagatatgttttggttgttagtacttattttaatttgtttggtcacacacttaataacacatgaaactatttatgtgaagtccttgttttattttaaaattctctttgtgtatttggaatcaaagccagcacattgtaacctgtgcttgtacgcaaaagaattagatttctttgtttttgttttattttttaaattgttgtaaaaattattataggccagctacatctagtagtaggtttggggtacagattgggggttgtgccatactgtttttaaagttcatgatcatctggaatgatacttagtgtatatatattttgtaaagttttaattcagcaaattttttgaaattgctgctgttttaaattataaaacctttatatttctgctttgtagaaattatatgttttgtagtattcattgattttctttcactgtacttaaatttagtgttagtactttaaaatttttaatttaccagtctttaaagcaacatccagaaaaaaaaaagtcttttcccatttaaaataggctcagccagttcaatgtcgccttgttatcagagaaatattagttcaatactgaaagaaaaatattatacctcttggtatctagaaaagcttgttcatccattataaatatatctttagccacagcaaaccacacttaacctatctataataaaaatgtgctttaaataaaaaaaaaaaaaaaaagggcggccg

SEQ ID NO: 92 - protein, 241 aa, Homo sapiens
METHSSPALAHVGPQDFFVYIILMMTWQSYQNTEVTLIDHSEEIFKTLNYLSNLLHSIKNPLGTRDNPARICKDLLNCEQKVSDGKYWIDPNLGCPSDAIEVFCNFSAGGQTCLPPVSVTKLEFGVGKVQMNFLHLLSSEATHIITIHCLNTPRWTSTQTSGPGLPIGFKGWNGQIFKVNTLLEPKVLSDDCKIQDGSWHKATFLFHTQEPNQLPVIEVQKLPHLKTERKYYIDSSSVCFL

SEQ ID NO: 93 - DNA, 3169 bp, Homo sapiens
  CDS (57)...(1568)
gtcgacccacgcgtccgcgcccgctgagccccccgccgaggtccggacaggccgagatgacgccgagccccctgttgctgctcctgctgccgccgctgctgctgggggccttcccgccggccgccgccgcccgaggccccccaaagatggcggacaaggtggtcccacggcaggtggcccggctgggccgcactgtgcggctgcagtgcccagtggagggggacccgccgccgctgaccatgtggaccaaggatggccgcaccatccacagcggctggagccgcttccgcgtgctgccgcaggggctgaaggtgaagcaggtggagcgggaggatgccggcgtgtacgtgtgcaaggccaccaacggcttcggcagcctgagcgtcaactacaccctcgtcgtgctggatgacattagcccagggaaggagagcctggggcccgacagctcctctgggggtcaagaggaccccgccagccagcagtgggcacgaccgcgcttcacacagccctccaagatgaggcgccgggtgatcgcacggcccgtgggtagctccgtgcggctcaagtgcgtggccagcgggcaccctcggcccgacatcacgtggatgaaggacgaccaggccttgacgcgcccagaggccgctgagcccaggaagaagaagtggacactgagcctgaagaacctgcggccggaggacagcggcaaatacacctgccgcgtgtcgaaccgcgcgggcgccatcaacgccacctacaaggtggatgtgatccagcggacccgttccaagcccgtgctcacaggcacgcaccccgtgaacacgacggtggacttcggggggaccacgtccttccagtgcaaggtgcgcagcgacgtgaagccggtgatccagtggctgaagcgcgtggagtacggcgccgagggccgccacaactccaccatcgatgtgggcggccagaagtttgtggtgctgcccacgggtgacgtgtggtcgcggcccgacggctcctacctcaataagctgctcatcacccgtgcccgccaggacgatgcgggcatgtacatctgccttggcgccaacaccatgggctacagcttccgcagcgccttcctcaccgtgctgccagacccaaaaccgccagggccacctgtggcctcctcgtcctcggccactagcctgccgtggcccgtggtcatcggcatcccagccggcgctgtcttcatcctgggcaccctgctcctgtggctttgccaggcccagaagaagccgtgcacccccgcgcctgcccctcccctgcctgggcaccgcccgccggggacggcccgcgaccgcagcggagacaaggaccttccctcgttggccgccctcagcgctggccctggtgtggggctgtgtgaggagcatgggtctccggcagccccccagcacttactgggcccaggcccagttgctggccctaagttgtaccccaaactctacacagacatccacacacacacacacacacactctcacacacactcacacgtggagggcaaggtccaccagcacatccactatcagtgctagacggcaccgtatctgcagtgggcacgggggggccggccagacaggcagactgggaggatggaggacggagctgcagacgaaggcaggggacccatggcgaggaggaatggccagcaccccaggcagtctgtgtgtgaggcatagcccctggacacacacacacagacacacacactgcctggatgcatgtatgcacacacatgcgcgcacacgtgctccctgaaggcacacgtacgcacacacgcacatgcacagatatgccgcctgggcacacagataagctgcccaaatgcacgcacacgcacagagacatgccagaacatacaaggacatgctgcctgaacatacacacgcacacccatgcgcagatgtgctgcctggacacacacacacacacggatatgctgtctggacgcacacacgtgcagatatggtatccggacacacacgtgcacagatatgctgcctggacacacagataatgctgccttgacacacacatgcacggatattgcctggacacacacacacacacgtgtgcacagatatgctgtctggacacgcacacacatgcagatatgctgcctggacacacacttccagacacacgtgcacaggcgcagatatgctgcctggacacacgcagatatgctgtctagtcacacacacacgcagacatgctgtccggacacacacacgcatgcacagatatgctgtccggacacacacacgcacgcagatatgctgcctggacacacacacagataatgctgcctcaacactcacacacgtgcagatattgcctggacacacacatgtgcacagatatgctgtctggacatgcacacacgtgcagatatgctgtccggatacacacgcacgcacacatgcagatatgctgcctgggcacacacttccggacacacatgcacacacaggtgcagatatgctgcctggacacacgcagactgacgtgcttttgggagggtgtgccgtgaagcctgcagtacgtgtgccgtgaggctcatagttgatgagggactttccctgctccaccgtcactcccccaactctgcccgcctctgtccccgcctcagtccccgcctccatccccgcctctgtcccctggccttggcggctatttttgccacctgccttgggtgcccaggagtcccctactgctgtgggctggggttgggggcacagcagccccaagcctgagaggctggagcccatggctagtggctcatccccactgcattctccccctgacacagagaaggggccttggtatttatatttaagaaatgaagataatattaataatgatggaaggaagactgggttgcagggactgtggtctctcctggggcccgggacccgcctggtctttcagccatgctgatgaccacaccccgtccaggccagacaccaccccccaccccactgtcgtggtggccccagatctctgtaattttatgtagagtttgagctgaagccccgtatatttaatttattttgttaaacatgaaagtgcaaaaaaaaaaaaaaaaaaaaaaaaaaaaaaaaaaaaaaaaaaaaaaaaaaagggcggccgc

SEQ ID NO: 94 - protein, 504 aa, Homo sapiens
MTPSPLLLLLLPPLLLGAFPPAAAARGPPKMADKVVPRQVARLGRTVRLQCPVEGDPPPLTMWTKDGRTIHSGWSRFRVLPQGLKVKQVEREDAGVYVCKATNGFGSLSVNYTLVVLDDISPGKESLGPDSSSGGQEDPASQQWARPRFTQPSKMRRRVIARPVGSSVRLKCVASGHPRPDITWMKDDQALTRPEAAEPRKKKWTLSLKNLRPEDSGKYTCRVSNRAGAINATYKVDVIQRTRSKPVLTGTHPVNTTVDFGGTTSFQCKVRSDVKPVIQWLKRVEYGAEGRHNSTIDVGGQKFVVLPTGDVWSRPDGSYLNKLLITRARQDDAGMYICLGANTMGYSFRSAFLTVLPDPKPPGPPVASSSSATSLPWPVVIGIPAGAVFILGTLLLWLCQAQKKPCTPAPAPPLPGHRPPGTARDRSGDKDLPSLAALSAGPGVGLCEEHGSPAAPQHLLGPGPVAGPKLYPKLYTDIHTHTHTHSHTHSHVEGKVHQHIHYQC

SEQ ID NO: 95 - DNA, 1074 bp, Mus musculus
  CDS (3)...(626)
  modified_base all "n" positions: n=a, c, g, or t
cacgcgtccggcccacgggtgatgtgtggtcacggcctgatggctcctacctcaacaagctgctcatctctcgggcccgccaggatgatgctggcatgtacatctgcctaggtgcaaataccatgggctacagtttccgtagcgccttcctcactgtattaccagaccccaaacctccagggcctcctatggcttcttcatcgtcatccacaagcctgccatggcctgtggtgatcggcatcccagctggtgctgtcttcatcctaggcactgtgctgctctggctttgccagaccaagaagaagccatgtgccccagcatctacacttcctgtgcctgggcatcgtcccccagggacatcccgagaacgcagtggtgacaaggacctgccctcattggctgtgggcatatgtgaggagcatggatccgccatggccccccagcacatcctggcctctggctcaactgctggccccaagctgtaccccaagctatacacagatgtgcacacacacacacatacacacacctgcactcacacgctctcatgttggagggcaaggttcatcaacaccagcatgtccactatcagtgctaaatacagcgaatctccaagcactgtgtcctgaggtaggcatttgggggccaaggcaacaggttgggagaattgagaacaatggaggaagagtatcttagggtgccttatggtggacactcacaaacttggccatatagatgtatgtactaccagatgaacagccagccagattcacacacgcacatgtttaaacgtgtaaacgtgtgcacaactgcacacacaacctgagaaaccttcaggaggatttgtggtgtgactttgcagtgacatgtagcgatggctagttgaaggaatctccctcatgtcttagtggtcatggccacttccccacccctgcccatctgtgttcctgcctggccttggtggtgcttccgtgtgccctgggttttccaggaaccctatcaacctgactggggtgagcagtgcagccatgcntggaggtttgagccaccctccccttgctagagagaagggcn

SEQ ID NO: 96 - protein, 208 aa, Mus musculus
RVRPTGDVWSRPDGSYLNKLLISRARQDDAGMYICLGANTMGYSFRSAFLTVLPDPKPPGPPMASSSSSTSLPWPVVIGIPAGAVFILGTVLLWLCQTKKKPCAPASTLPVPGHRPPGTSRERSGDKDLPSLAVGICEEHGSAMAPQHILASGSTAGPKLYPKLYTDVHTHTHTHTCTHTLSCWRARFINTSMSTISAKYSESPSTVS

SEQ ID NO: 97 - DNA, 1423 bp, Homo sapiens
  CDS (31)...(444)
gtcgacccacgcgtccgcccacgcgtccggatgcctggacccagagtgtgggggaaatatctctggagaagccctcactccaaaggctgtccaggcgcaatgtggtggctgcttctctggggagtcctccaggcttgcccaacccggggctccgtcctcttggcccaagagctaccccagcagctgacatcccccgggtacccagagccgtatggcaaaggccaagagagcagcacggacatcaaggctccagagggctttgctgtgaggctcgtcttccaggacttcgacctggagccgtcccaggactgtgcaggggactctgtcacagtgagctggggatggggggggtcccgccaggactgtggccagggagattcccggggttgtgggaagtggcggtgccctgaatcccccatctggaggagggatgaattttccatgtaggggcagtcgggcttggcttaccggggagcagtggtggaccccaggacacagcctcccaccagcgcctccggggctgccatctgggccccacagagcaaagagggcagcaagcaggccctgcgtttggaaggcttatgaatggacacacaaatcttgcaaatctatggagccaggggcagggacgcacatattggttgttaaaaatatgtcatcatgtatttgttgagtgcctgctctatcaggtgaggaagctggacacaaataataacaaaagattaagtcaccgttcacacttaccttggaagagctattacaaaacttctaacgccaaagccttattcagaataaggacattttaaaaacagtacttgatggagtgatgcaagcttgcagtcccagcagtatagtcaggagactgaggctggaggatcagagggctggagcccagggttcaaggccagcctaagcaacatagcaagaccccatctcaaaaataagtaaataataaataaaaataaaaagagcacattatcttttgatttaaattttatttatatcaaaatgacataaatttttgaactttattttttaattttaaaatttttaattattatggatacataatagttgtaagactttttgttttttaattaaagttttctaaggctgggcgcagtagctcatgtctgtagtcccagcactttgggaggctgaggcgaaagaagcacttgagcccaggaatttgagaccagcctgggcaacatagcaagaccccatctctacaaaaaaatttaaaaattagccaagtgtggtggcacgcacctgtggtcccagctacaagggacgctgaagtgagaggatcacttgagcctggaaggtagaggctgcagtgagctctgatcatgacaccgtactccagcctgggtgacagagtgagaccctgtctccaaaaaaaaaaaaaaaaaagggcggccgc

SEQ ID NO: 98 - protein, 138 aa, Homo sapiens
MPGPRVWGKYLWRSPHSKGCPGAMWWLLLWGVLQACPTRGSVLLAQELPQQLTSPGYPEPYGKGQESSTDIKAPEGFAVRLVFQDFDLEPSQDCAGDSVTVSWGWGGSRQDCGQGDSRGCGKWRCPESPIWRRDEFSM

SEQ ID NO: 99 - DNA, 3567 bp, Rauttus sp.
  CDS (925)...(2832)
gtccgacccacgcgtccgagccacaccctgaaggtggttggaaggagggaaggatctaggtcctgagcactggaattccccagaacagcatctggcttcccagacccatgctggccaccactgatgtgtccttccggctgctggctgcagtgctgttctgttgttgggtgccctgtggcaggcttgtgcaatgccactctgtcccctcctcctcctggccctaggcctgcgtctggctggaacactcaactccaatgatcccaatgtctgtaccttctgggaaagcttcaccacgaccactaaggagtcccaccttcgccccttcagcctgcccccagccgagtcctgcgacaggccctgggaagacccccacacctgcgctcagcctacggttgtctaccggactgtgtaccgtcaggtggtgaagatggactcccgcccacgcctgcagtgctgtgggggttactacgagagcagtggagcctgtgtcccactctgtgcccaggagtgtgtccacggtcgctgtgtggctcctaatcggtgccagtgtgcaccaggctggcggggtgacgactgttccagtgagtgtgctcctggaatgtggggaccacagtgtgacaggctctgcctctgtggcaacagcagttcctgtgatcccaggagtggggtgtgtttttgcccctctggcctgcagccccccgactgccttcagccttgccccgatggccactatggtcctgcctgccagtttgattgccattgctatggggcatcctgtgacccccgggatggagcctgcttctgccccccagggagaacaggacccagggcactgatggcttcttctgccccagaacttatccttgccaaaatggaggtgttcctcagggctctcaaggctcctgcagctgcccaccgggctggatgggtgtcatctgttccctgccatgcccagagggtttccacggacccaactgtactcaggaatgtcgttgccacaatggtggcctttgtgacaggtttactgggcagtgccactgtgctcctggctatatcggggatcggtgccgtgaagagtgccctgtgggccgcttcggtcaagactgtgctgagacctgtgactgtgctcctggcgctcgttgctttcctgccaatggcgcgtgtctgtgcgaacatggcttcacaggcgaccgctgcactgagcgactctgtccagatggccgctatggtctgagctgccaagatccctgcacctgcgacccagaacacagtctcagctgccacccaatgcacggcgagtgctcctgccagccaggttgggcgggcctccactgcaacgagagctgccctcaggacacgcacggagccggttgccaggagcactgcctctgtctgcacggcggtgtttgcctcgccgacagcggcctctgccggtgtgcacctggctacacgggacctcactgcgctaatctttgtccacctaacacttatgggatcaactgttcctcccactgctcctgtgaaaatgccattgcctgctctcctgtcgacggcacgtgcatctgcaaggaaggttggcagcgtggtaactgctctgtgccctgtccccctggcacctggggcttcagttgcaatgccagttgccagtgtgcccacgagggagtctgcagcccccaaactggagcctgtacttgcacccctgggtggcgtggggttcactgccaacttccgtgcccgaagggacagtttggtgaaggttgtgccagtgtctgtgactgtgaccactccgatggctgtgaccctgttcatggacactgccgatgtcaggctggctggatgggcacacgttgccacctgccttgcccagagggcttttggggagccaactgcagcaatgcctgtacctgcaagaatggtggcacttgtgtacctgagaacggcaactgtgtgtgcgcaccagggttcagaggcccctcctgccagaggccctgcccgcctggtcgctatggcaaacgctgtgtgccctgcaagtgcaacaaccattcttcctgccacccgtcggatgggacctgctcctgcctggcaggctggacaggccctgactgctctgaatcatgtcccccaggccactggggactcaaatgctcccaaccctgccagtgtcatcatggtgccacctgccacccccaggatgggagctgtgtctgcatcccaggctggactggacccaactgctcggaaggctgcccatcaagaatgtttggtgtcaactgctcccagctatgtcagtgtgatcctggagagatgtgccacccagagactggggcttgcgtctgtcccccaggacacagtggtgcgcactgcaaagtgggcagccaggagtccttcaccataatgcccacctctcctgtgatccataactcactgggtgccgtgattggcattgcagtgctggggacccttgtggtggccctggtagcactgtttattggctaccgacactggcaaaagggcaaggaacatgagcacttggcagtggcttacagcactgggcgactggatggctccgattacgtcatgccagatgtctctccgagctacagtcactactattccaaccctagctaccacacactgtctcagtgttctcctaaccctccaccccctaacaagattccaggcagtcagctgtttgtcagctcccaggcatctgagcggccaaacagaaaccatgggcgagataaccacgccacactgcccgctgactggaagcaccgacgggagtcccatgacagagctttcctcaggcaccagccacctggaccgaaggtatagctgtagctatggccacaggaatggcccggggccattctgtcataaaggtcccatctctgaagaaggactaggggcaagcgttatgtccctgagcagtgagaacccctatgcgaccatccgagacctgcccggcctgcctggggaaccccgagaaagcagctatgtggagatgaaaggccctccatcagtgtctccccccaggcagcctcttcatctccgggacaggcagcagcagcaactgcagtctcagagagacagcggcacctatgagcagcccactcccttgagccgtaatgaagagtctgtgggctccatgccccctcttcctccgggcctgccacccggccactatgactcgcccaaaaacagccacatccctggacactatgacttgcctccagtacggcatcctccatcacctccatcccggcgccaggaccgctgaggagccagcatggtatgggagagtgcctgtgaaccctgccaggagcagggcctggaccagcaggccatgaatagacatacttggtgaagtgaacggagactgaggatggctctgcttccaccgagggagacactagttggcaaagtgtctaacctcccttttccagcccattgctcaagtcccccaggctgtggacatgagctggtgggcagaatgttgttgttgaagtctgattttagattgattttttaaaaaaaaaaaaaaaaaaaaaaaaaaagggcggccgc

SEQ ID NO: 100 - protein, 636 aa, Rauttus sp.
MGVICSLPCPEGFHGPNCTQECRCHNGGLCDRFTGQCHCAPGYIGDRCREECPVGRFGQDCAETCDCAPGARCFPANGACLCEHGFTGDRCTERLCPDGRYGLSCQDPCTCDPEHSLSCHPMHGECSCQPGWAGLHCNESCPQDTHGAGCQEHCLCLHGGVCLADSGLCRCAPGYTGPHCANLCPPNTYGINCSSHCSCENAIACSPVDGTCICKEGWQRGNCSVPCPPGTWGFSCNASCQCAHEGVCSPQTGACTCTPGWRGVHCQLPCPKGQFGEGCASVCDCDHSDGCDPVHGHCRCQAGWMGTRCHLPCPEGFWGANCSNACTCKNGGTCVPENGNCVCAPGFRGPSCQRPCPPGRYGKRCVPCKCNNHSSCHPSDGTCSCLAGWTGPDCSESCPPGHWGLKCSQPCQCHHGATCHPQDGSCVCIPGWTGPNCSEGCPSRMFGVNCSQLCQCDPGEMCHPETGACVCPPGHSGAHCKVGSQESFTIMPTSPVIHNSLGAVIGIAVLGTLVVALVALFIGYRHWQKGKEHEHLAVAYSTGRLDGSDYVMPDVSPSYSHYYSNPSYHTLSQCSPNPPPPNKIPGSQLFVSSQASERPNRNHGRDNHATLPADWKHRRESHDRAFLRHQPPGPKV

SEQ ID NO: 101 - DNA, 1497 bp, Homo sapiens
  CDS (217)...(684)
gtcgacccacgcgtccggctcccagcccacccccaaacagacacagcgtagcccgggccagctcttaaggagttcaggagtgagaagaggccctcagagatctgacagcctaggagtgcgtggacaccacctcagcccactgagcaggagtcacagcacgaagaccaagcgcaaagcgacccctgccctccatcctgactgctcctcctaagagagatggcaccggccagagcaggattctgcccccttctgctgcttctgctgctggggctgtgggtggcagagatcccagtcagtgccaagcccaagggcatgacctcatcacagtggtttaaaattcagcacatgcagcccagccctcaagcatgcaactcagccatgaaaaacattaacaagcacacaaaacggtgcaaagacctcaacaccttcctgcacgagcctttctccagtgtggccgccacctgccagacccccaaaatagcctgcaagaatggcgataaaaactgccaccagagccacgggcccgtgtccctgaccatgtgtaagctcacctcagggaagtatccgaactgcaggtacaaagagaagcgacagaacaagtcttacgtagtggcctgtaagcctccccagaaaaaggactctcagcaattccacctggttcctgtacacttggacagagtcctttaggtttccagactggcttgctctttggctgaccttcaattccctctccaggactccgcaccactcccctacacccagagcattctcttcccctcatctcttggggctgttcctggttcagcctctgctgggaggctgaagctgacactctggtgagctgagctctagagggatggcttttcatctttttgttgctgttttcccagatgcttatccccaagaaacagcaagctcaggtctgtgggttccctggtctatgccattgcacatgtctcccctgccccctggcattagggcagcatgacaaggagaggaaataaatggaaagggggcatatgggatttgtggacacagctgtttctgttcctgaactagaagtcttccccagctctgacgtggcagtgaggtgacctgaaggaaagaaaaatataaataaataccacttcatatttgtatagaatcctctaatcccttgtgacatagacttgacagggattgtatgccttctttatggatgaggaaattaaggttttagaaagcttaatgaattaaagagcttgtctaattagttagtagcagaacctggacttgaacctaggtctccttgctctaaatacagtgtaccttctactctaccagttgcgcaagaaagaagtcactgttacagaggcaagcggtgaactaggtaagagttcactcatgaagaaacgagtgctctgaagagccagttaccctgtgttggctgcaataaaggtcattacctctctagccaaaaaaaaaaaaaaaaaaaaaaaaaaaaaaaaaaaaaaaaaa

SEQ ID NO: 102 - protein, 156 aa, Homo sapiens
MAPARAGFCPLLLLLLLGLWVAEIPVSAKPKGMTSSQWFKIQHMQPSPQACNSAMKNINKHTKRCKDLNTFLHEPFSSVAATCQTPKIACKNGDKNCHQSHGPVSLTMCKLTSGKYPNCRYKEKRQNKSYVVACKPPQKKDSQQFHLVPVHLDRVL

SEQ ID NO: 103 - DNA, 1788 bp, Homo sapiens
  CDS (62)...(976)
gtcgacccacggcgtccggccaggctccactgaggggaacggggacctgtctgaagagaagatgcccctgctgacactctacctgctcctcttctggctctcaggctactccattgccactcaaatcaccggtccaacaacagtgaatggcttggagcggggctccttgaccgtgcagtgtgtttacagatcaggctgggagacctacttgaagtggtggtgtcgaggagctatttggcgtgactgcaagatccttgttaaaaccagtgggtcagagcaggaggtgaagagggaccgggtgtccatcaaggacaatcagaaaaaccgcacgttcactgtgaccatggaggatctcatgaaaactgatgctgacacttactggtgtggaattgagaaaactggaaatgaccttggggtcacagttcaagtgaccattgacccagcgtcgactcctgcccccaccacgcctacttccactacgtttacagcaccagtcacccaagaagaaactagcagctccccaactctgaccggccaccacttggacaacaggcacaagctcctgaagctcagtgtcctcctgcccctcatcttcaccatattgctgctgcttttggtggccgcctcactcttggcttggaggatgatgaagtaccagcagaaagcagccgggatgtccccagagcaggtactgcagcccctggagggcgacctctgctatgcagacctgaccctgcagctggccggaacctccccgcgaaaggctaccacgaagctttcctctgcccaggttgaccaggtggaagtggaatatgtcaccatggcttccttgccgaaggaggacatttcctatgcatctctgaccttgggtgctgaggatcaggaaccgacctactgcaacatgggccacctcagtagccacctccccggcaggggccctgaggagcccacggaatacagcaccatcagcaggccttagcctgcactccaggctccttcttggaccccaggctgtgagcacactcctgcctcatcgaccgtctgccccctgctcccctcatcaggaccaacccggggactggtgcctctgcctgatcagccagcattgcccctagctctgggttgggcttggggccaagtctcagggggcttctaggagttggggttttctaaacgtcccctcctctcctacatagttgaggagggggctagggatatgctctggggctttcatgggaatgatgaagatgataatgagaaaaatgttatcattattatcatgaagtaccattatcataatacaatgaacctttatttattgcctaccacatgttatgggctgaataatggcccccaaagatatctgtgtcctaatcctcagaacttgtgactgttaccttctgtggcagaaagggacagtgcagatgtatgtaagttaaggactttgagatagagaggttattcttgctgattcaggtgggcccaaaatatcaccacaagggtcctcataagaaagaggccagaaggtcaaagaggtagagacaaagtgatgatggaagtggacgtgggtgtgacgtgagcaggggccatgaatgccgcagccttcagatgccagaaagggaaaggaatggattcccctgcctggagcctccaaaagaaaccagccctgcccacgccttgacttgagcccattgaaactgatcttgagctcctggcctccagaattgcaggagaataaatttgtgttgtttttaaaaaaaaaaaaaaaaaaaaagggcggccgctaga

SEQ ID NO: 104 - protein, 305 aa, Homo sapiens [sequence omitted]

SEQ ID NO: 105 - DNA, 3284 bp, Homo sapiens; identical to SEQ ID NO: 91
  CDS (1222)...(1944)

SEQ ID NO: 106 - protein, 241 aa, Homo sapiens; identical to SEQ ID NO: 92

SEQ ID NO: 107 - DNA, 3169 bp, Homo sapiens; identical to SEQ ID NO: 93
  CDS (57)...(1568)

SEQ ID NO: 108 - protein, 504 aa, Homo sapiens; identical to SEQ ID NO: 94

SEQ ID NO: 109 - DNA, 1074 bp, Mus musculus; identical to SEQ ID NO: 95
  CDS (3)...(626)
  modified_base all "n" positions: n=a, c, g, or t

SEQ ID NO: 110 - protein, 208 aa, Mus musculus; identical to SEQ ID NO: 96

SEQ ID NO: 111 - DNA, 1423 bp, Homo sapiens; identical to SEQ ID NO: 97
  CDS (31)...(444)

SEQ ID NO: 112 - protein, 138 aa, Homo sapiens; identical to SEQ ID NO: 98

SEQ ID NO: 113 - DNA, 5036 bp, Homo sapiens
  CDS (230)...(3379)
gtcgacccacgcgtccgctcgaagcggggaccctcgccccgtcctcggctgtccagtcctcctcctcgcagaccccggcggttcctaccccaggccgcaggggagacggtgccccaaggcaggcttcatatcctgaacgctgggatcccccaggacattccctggcccccaggccccaggtcccaggccccagggctgagctgtgggcaggccccacctggcctctgcaatgtcaccgcctctgtgtcccctccttctcctggctgtgggcctgcggctggctggaactctcaaccccagtgatcccaatacctgcagcttctgggaaagcttcactaccaccaccaaggagtcccactcccgccccttcagcctgctcccctcagagccctgcgagcggccctgggagggcccccatacttgccccagcccacaaactcagaggaaactcctggcttctagggattcattctgcatggtctgtgtcggggctggagtgcagtggcgagatcgtagtgcactgcaacctcaaacagggaatgcgctttctatgcgccctcagcccagagtgttgagtggtgccccttccctggcctcccctggccacactgtggtggtgaagacggaccaccgccagcgcctgcagtgctgccatggcttctatgagagcagggggttctgtgtcccgctctgtgcccaggagtgtgtccatggccgttgtgtggcacccaatcagtgccaatgtgtgccaggctggcggggcgacgactgttccagtgccccgaactgccttcagccctgtacccctggctactatggccctgcctgccagttccgctgccagtgccatggggcaccctgcgatccccagactggagcctgcttctgccccgcagagagaactgggcccagctgtgacgtgtcctgttcccagggcacttctggcttcttctgccccagcacccatccttgccaaaatggaggtgtcttccaaaccccacagggctcctgcagctgcccccctggctggatgggcaccatctgctccctgccctgcccagagggctttcacggacccaactgctcccaggaatgtcgctgccacaacggcggcctctgtgaccgattcactgggcagtgccgctgcgctccgggttacactggggatcggtgccgggaggagtgcccggtgggccgctttgggcaggactgtgctgagacgtgcgactgcgccccggacgcccgttgcttcccggccaacggcgcatgtctgtgcgaacacggcttcactggggaccgctgcacggatcgcctctgccccgacggcttctacggtctcagctgccaggccccctgcacctgcgaccgggagcacagcctcagctgccacccgatgaacggggagtgctcctgcctgccgggctgggcgggcctccactgcaacgagagctgcccgcaggacacgcatgggccagggtgccaggagcactgtctctgcctgcacggtggcgtctgccaggctaccagcggcctctgtcagtgcgcgccgggttacacgggccctcactgtgctagtctttgtcctcctgacacctacggtgtcaactgttctgcacgctgctcatgtgaaaatgccatcgcctgctcacccatcgacggcgagtgcgtctgcaaggaaggttggcagcgtggtaactgctctgtgccctgcccacccggaacctggggcttcagttgcaatgccagctgccagtgtgcccatgaggcagtctgcagcccccaaactggagcctgtacctgcacccctgggtggcatggggcccactgccagctgccctgtccgaaggggcagtttggagaaggttgtgccagtcgctgtgactgtgaccactctgatggctgtgaccctgttcatggacgctgtcagtgccaggctggctggatgggtgcccgctgccacctgtcctgccctgagggcttatggggagtcaactgtagcaacacctgcacctgcaagaatgggggcacctgtctccctgagaatggcaactgcgtgtgtgcacccggattccggggcccctcctgccagagatcctgtcagcctggccgctatggcaaacgctgtgtgccctgcaagtgcgctaaccactccttctgccacccctcgaacgggacctgctactgcctggctggctggacaggccccgactgctcccagccatgccctccaggacactggggagaaaactgtgcccagacctgccaatgtcaccatggtgggacctgccatccccaggatgggagctgtatctgccccctaggctggactggacaccactgcttagaaggctgccctctggggacatttggtgctaactgctcccagccatgccagtgtggtcctggagaaaagtgccacccagagactggggcctgtgtatgtcccccagggcacagtggtgcaccttgcaggattggaatccaggagccctttactgtgatgccgaccactccagtagcgtataactcgctgggtgcagtgattggcattgcagtgctggggtcccttgtggtagccctggtggcactgttcattggctatcggcactggcaaaaaggcaaggagcaccaccacctggctgtggcttacagcagcgggcgcctggacggctccgagtatgtcatgccagatgtccctccgagctacagtcactactactccaaccccagctaccacaccctgtcgcagtgctccccaaaccccccaccccctaacaaggttccaggcccgctctttgccagcctgcagaaccctgagcggccaggtggggcccaagggcatgataaccacaccaccctgcctgctgactggaagcaccgccgggagccccctccagggcctctggacagggggagcagccgcctggaccgaagctacagctatagctacagcaatggcccaggcccattctacgataaagggctcatctctgaagaggagctcggggccagtgtggcttccctgagcagtgagaacccatatgccaccatccgggacctgcccagcttgccagggggcccccgggagagcagctacatggagatgaaaggccctccctcaggatctgcccccaggcagcctcctcagttttgggacagccagaggcggcggcaaccccagccacagagagacagtggcacctacgagcagcccagccccctgatccatgaccgagactctgtgggctcccagccccctctgcctccgggcctaccccccggccactatgactcacccaagaacagccacatccctggacattatgacttgcctccagtacggcatcccccatcacctccacttcgacgccaggaccgttgaggagccaggatggtatggcagaggccagcacacctggctgttgctgctcaaggctggggacagagcctagtgtacccctgccaggagcagggagtggaccggcaggctgtgaacatgaacaacgcttaacagagcaagtgatgggagccttgttcctgggttctaccatgggagacgctgatcagcaggatgcctggctccctttcccaacccactgctcccaaggcctccagggccctgtgtacataaactggtgggttggaagttgctgggtaactctgatttcagacatgcgtgtggggtaccttttctgtgcatgctcagcctgggctctgtgcgtgtgtgtgtttctgtgattttagaagggtaccaggcaggttctgtcctagggcacttaccatttagtagggagatggaaccaacccaattaactctagcaatagcctcctaactggcctcctccattgattcagtgaaccttccaatgcatggctcataatttcaaaatacaggctggttagttactccctacctgaaagccttcataggtgcctctttgctcttctgccagtatcaaaacttttgaaggccttaaaggccctgctttgcctggcccatctgtctctccagcctcaccttgaactgtgttcctgtcactgcacgccagtcacaccggcctctaggtcctcctgtaggccactcttctttctggcacagggacctgcacacctggagtgcccttcctcccccactcgcctgttcacccctgcttttcctttacacctcctcctcagggaagtgcccaccctccgtacatctttcacagccctgattgcagctgtgttcactcaccaggtacctgcagaaggcctacagggtgccaggcacttctttaatgggttctttctttatgtgattatttgattaatctctgcctcccccactagactgtaagctccctgaaggcaagaatcctgtgcttatgctcaatattagctctcccttggcacagagtaggcactcaacaaatgctccccaaaaggctgagtggctgactgaattaagtaccagtgacatgcagtaactgctaagatagatgagccatctgtatgctctgacagttacagactgaataagttggagacttccctaaagggtggcatttccccagggtaacaacgcagagctcaggtgtgggaaggtgccaggggcaggggtgcagaggggctgaggctgaggggggtgcagaggctggagaaaggataacaggagagagtatacaggcatgccttgatttattgcacttcacaggtagcagaatttttaaagaaattgaaggttttgggacatatatgtgacagcaataggttaagaaaagcaaagcagagaaattgaagatttgtgtcaacactgctttaagcaaatctgttggcaccatttttccaatagcatgtgcccattttgggtctctacattgcattttggtaattgcttgcaatatttcaagcattttcattgttattatatgtgttatagtgatctgtgatcagtgatctttgatatattattgtaattgtttcggggcgccatgaaccgcacccatataacacggtaaacttaatcagcaaaaaaaaaaaaaaaaaaagggcggccg

SEQ ID NO: 114 - protein, 1050 aa, Homo sapiens
MSPPLCPLLLLAVGLRLAGTLNPSDPNTCSFWESFTTTTKESHSRPFSLLPSEPCERPWEGPHTCPSPQTQRKLLASRDSFCMVCVGAGVQWRDRSALQPQTGNALSMRPQPRVLSGAPSLASPGHTVVVKTDHRQRLQCCHGFYESRGFCVPLCAQECVHGRCVAPNQCQCVPGWRGDDCSSAPNCLQPCTPGYYGPACQFRCQCHGAPCDPQTGACFCPAERTGPSCDVSCSQGTSGFFCPSTHPCQNGGVFQTPQGSCSCPPGWMGTICSLPCPEGFHGPNCSQECRCHNGGLCDRFTGQCRCAPGYTGDRCREECPVGRFGQDCAETCDCAPDARCFPANGACLCEHGFTGDRCTDRLCPDGFYGLSCQAPCTCDREHSLSCHPMNGECSCLPGWAGLHCNESCPQDTHGPGCQEHCLCLHGGVCQATSGLCQCAPGYTGPHCASLCPPDTYGVNCSARCSCENAIACSPIDGECVCKEGWQRGNCSVPCPPGTWGFSCNASCQCAHEAVCSPQTGACTCTPGWHGAHCQLPCPKGQFGEGCASRCDCDHSDGCDPVHGRCQCQAGWMGARCHLSCPEGLWGVNCSNTCTCKNGGTCLPENGNCVCAPGFRGPSCQRSCQPGRYGKRCVPCKCANHSFCHPSNGTCYCLAGWTGPDCSQPCPPGHWGENCAQTCQCHHGGTCHPQDGSCICPLGWTGHHCLEGCPLGTFGANCSQPCQCGPGEKCHPETGACVCPPGHSGAPCRIGIQEPFTVMPTTPVAYNSLGAVIGIAVLGSLVVALVALFIGYRHWQKGKEHHHLAVAYSSGRLDGSEYVMPDVPPSYSHYYSNPSYHTLSQCSPNPPPPNKVPGPLFASLQNPERPGGAQGHDNHTTLPADWKHRREPPPGPLDRGSSRLDRSYSYSYSNGPGPFYDKGLISEEELGASVASLSSENPYATIRDLPSLPGGPRESSYMEMKGPPSGSAPRQPPQFWDSQRRRQPQPQRDSGTYEQPSPLIHDRDSVGSQPPLPPGLPPGHYDSPKNSHIPGHYDLPPVRHPPSPPLRRQDR

SEQ ID NO: 115 - DNA, 2569 bp, Mus musculus
  CDS (2)...(1492)
gtcgacccacgcgtccggtgaccctgttcatggacagtgccgatgtcaggctggttggatgggcacacgctgccacctgccttgcccggagggcttttggggagccaactgcagtaacacctgtacctgcaagaatggtggtacctgtgtgtctgagaatggcaactgcgtgtgcgcaccagggttccgaggcccctcctgccagaggccctgcccgcctggtcgctatggcaaacgctgtgtgcaatgcaagtgtaacaacaaccattcttcctgccacccatcggacgggacctgctcctgcctggcgggctggacaggccctgactgctccgaggcatgtcccccaggccactggggactcaaatgctcccaactctgccagtgtcatcatggtgggacctgccacccccaggatgggagctgtatctgcacgccaggctggactggacccaactgcttggaaggctgcccaccaagaatgtttggtgtcaactgctcccagctatgtcagtgtgatctcggagagatgtgccacccagagactggggcttgtgtctgtcccccaggacacagtggtgcagactgcaaaatgggaagccaggagtccttcaccataatgcccacctctcccgtgacccataactcactgggtgcagtgattggcattgcagtactgggaaccctcgtggtggccctgatagcactgttcattggctaccgccagtggcaaaagggcaaggaacatgagcacttggcagtggcttacagcactgggcggctggatggctctgattacgtcatgccagatgtctctccgagctatagtcactactactccaaccccagctaccacacactgtctcagtgttctcctaaccccccgccccctaacaaggtcccaggcagtcagctctttgtcagctctcaggcccctgagcggccaagcagagcccacgggcgtgagaaccataccacactgcccgctgactggaagcaccgccgggagccccatgacagaggcgccagccacctggaccgaagctatagctgtagctatagccacaggaatggcccaggaccattctgtcataaaggtcccatctctgaagagggactaggggcaagcgttatgtccctgagcagtgagaacccctatgctaccatccgagacctgcccagcctgcctggggaaccccgagaaagtggctatgtggagatgaaaggacctccatcagtgtcccctcccaggcagtctcttcatctccgggacaggcagcagcggcaactgcagccacagagggacagcggcacctatgagcagcccagccccttgagccataatgaagagtctttgggctccacgcccccgcttcctccaggcctgcctcctggtcactacgactcccccaagaacagccatatccctggacactatgacttgcctccagtacggcatcctccatcccctccatcccggcgccaggaccgctgaagagccggcatggtatgggagcgtgcctatgtaccttgccaggagcagggactggaccagcaggccacgaacagaaacacttggtgaagtgaacagagacggactgtggccctgtgcttccaccgagggagacactagttgacaaagtgtctaaccctcttttccaacccactgctcaagtccctgtggacataagctggtgggcagaatgttgttgtacaagtgtgattttagatcgatttttttttaaagtatgtgttgggtaccttttctgtgtgtatgctcaggcaggctgtgtgtgtctctagttggctttagagggagtcaggtataggttctgccttctgcactttccatcttatctagtagtcagcttccaagcttaactagttagagctccaccagcagcaggccctaactacctgcctgcccttcacccagtaatcctccatgtctttgctcagaggattgctccccgactctggtgttgtcctcctggtacgccttgacggtcctgcagtctccctttcccgtcttgcttcattctttcccagaatgaaggctgtctgccaccctacttcccagcccaggaattggcacatctaagttcagccttcctaagttacccgttgagtcctgcttgcccttcacatattccacagaacacccaccccacatctgcttcatagctactctcttctccacgtacccacagaaggcagaagtggtaccaggcaagaagatgggattgttgcattttgttttgtttttgagactctgtctcactatgtagtcctggctggcctggaactcaagagctctgcctgcctctgcctcttgagtgctgggtttaacggctcagggtcacatgcacagctcaagctgcactccgatgtgctttcccctgttgctagattagcgtctgcctccccctagtggagaggctgatcgccagctctctgatgcaggactctggtgtttaggctcactcactattggtttccttggcacagggtagtcactcaataaatgttcctctaaaagctgaaaaaaaaaaaaaaaaagggcggccgc

SEQ ID NO: 116 - protein, 497 aa, Mus musculus
STHASGDPVHGQCRCQAGWMGTRCHLPCPEGFWGANCSNTCTCKNGGTCVSENGNCVCAPGFRGPSCQRPCPPGRYGKRCVQCKCNNNHSSCHPSDGTCSCLAGWTGPDCSEACPPGHWGLKCSQLCQCHHGGTCHPQDGSCICTPGWTGPNCLEGCPPRMFGVNCSQLCQCDLGEMCHPETGACVCPPGHSGADCKMGSQESFTIMPTSPVTHNSLGAVIGIAVLGTLVVALIALFIGYRQWQKGKEHEHLAVAYSTGRLDGSDYVMPDVSPSYSHYYSNPSYHTLSQCSPNPPPPNKVPGSQLFVSSQAPERPSRAHGRENHTTLPADWKHRREPHDRGASHLDRSYSCSYSHRNGPGPFCHKGPISEEGLGASVMSLSSENPYATIRDLPSLPGEPRESGYVEMKGPPSVSPPRQSLHLRDRQQRQLQPQRDSGTYEQPSPLSHNEESLGSTPPLPPGLPPGHYDSPKNSHIPGHYDLPPVRHPPSPPSRRQDR

SEQ ID NO: 117 - DNA, 1497 bp, Homo sapiens; identical to SEQ ID NO: 101
  CDS (217)...(684)

SEQ ID NO: 118 - protein, 156 aa, Homo sapiens; identical to SEQ ID NO: 102

SEQ ID NO: 119 - DNA, 1788 bp, Homo sapiens; identical to SEQ ID NO: 103
  CDS (62)...(976)

SEQ ID NO: 120 - protein, 305 aa, Homo sapiens [sequence omitted]

SEQ ID NO: 121 - DNA, 3258 bp, Homo sapiens
  CDS (42)...(1625)
cacgcgtccggccagttcttggaggagactctgcacagggcatggatcactgtggtgcccttttcctgtgcctgtgccttctgactttgcagaatgcaacaacagagacatgggaagaactcctgagctacatggagaatatgcaggtgtccaggggccggagctcagttttttcctctcgtcaactccaccagctggagcagatgctactgaacaccagcttcccaggctacaacctgaccttgcagacacccaccatccagtctctggccttcaagctgagctgtgacttctctggcctctcgctgaccagtgccactctgaagcgggtgccccaggcaggaggtcagcatgcccggggtcagcacgccatgcagttccccgccgagctgacccgggacgcctgcaagacccgccccagggagctgcggctcatctgtatctacttctccaacacccactttttcaaggatgaaaacaactcatctctgctgaataactacgtcctgggggcccagctgagtcatgggcacgtgaacaacctcagggatcctgtgaacatcagcttctggcacaaccaaagcctggaaggctacaccctgacctgtgtcttctggaaggagggagccaggaaacagccctgggggggctggagccctgagggctgtcgtacagagcagccctcccactctcaggtgctctgccgctgcaaccacctcacctactttgctgttctcatgcaactctccccagccctggtccctgcagagttgctggcacctcttacgtacatctccctcgtgggctgcagcatctccatcgtggcctcgctgatcacagtcctgctgcacttccatttcaggaagcagagtgactccttaacacgcatccacatgaacctgcatgcctccgtgctgctcctgaacatcgccttcctgctgagccccgcattcgcaatgtctcctgtgcccgggtcagcatgcacggctctggccgctgccctgcactacgcgctgctcagctgcctcacctggatggccatcgagggcttcaacctctacctcctcctcgggcgtgtctacaacatctacatccgcagatatgtgttcaagcttggtgtgctaggctggggggccccagccctcctggtgctgctttccctctctgtcaagagctcggtatacggaccctgcacaatccccgtcttcgacagctgggagaatggcacaggcttccagaacatgtccatatgctgggtgcggagccccgtggtgcacagtgtcctggtcatgggctacggcggcctcacgtccctcttcaacctggtggtgctggcctgggcgctgtggaccctgcgcaggctgcgggagcgggcggatgcaccaagtgtcagggcctgccatgacactgtcactgtgctgggcctcaccgtgctgctgggaaccacctgggccttggccttcttttcttttggcgtcttcctgctgccccagctgttcctcttcaccatcttaaactcgctctacggtttcttccttttcctgtggttctgctcccagcggtgccgctcagaagcagaggccaaggcacagatagaggccttcagctcctcccaaacaacacagtagtccgggcctcctggcctggaatcctcagcctctctggccgccagtagcctgaggctacggctcctgctagagagggtggcaggcctgctgctggaccccagaggccactgtgaccgccaaggggccttttccacttccacggcctctccaggcactgaggggaaggcattgctctacctctccctgacattttgctccggggcagatccaaccttacctggggcagcaaactttgtcctggtacctgggcccagctcgccagggatgtgggcagagcaccagcctgggcatcaggaagccaagtttcaaggactgtctttgagtctgtctgtatgaccttgggcctgccacttctcacagaccctaggtatccacagctgtgacatgggggcaagcggctttgtttcagcctaacccaggagcttagtaaaaattgcataagaccagggggaagagtgtcagcgtggggtgggaattcccgcggcctccacctgcttgctaggggcaggatctcattcaggctgccctggaagcacctgcttggccctgccaccttcctccaggggagggccagatggcatcctggcttggggcgggtgggacctacccaggctctgagactttactggcctatgcctgaggcctcttttcctttaactccctaaattatgatgactccaagtccaagcccacccttcccaaagattgggaggttccgccgttcccagaggctcctcctgcggtgctcccaagacttccatagaccatctggaccagtagcccatcccgcagttttcttgggggcagaggaaaacgcttctttctcctccagctgaatcagctggatcccagtgtcctggctgtttggtgattgggcaagattgaatttgcccaggtaggcgtgagagtgtgggttttaaattcgaagctcaggccatagtttcagagaatcacccttaccccagaccttcatgagacagtgctcatgaagccagtgcgtttcccagaacgaacactaggcggcaccgttggtccacactcagaggcccttggcgccaagactgcatctagaatcgctcaaacacctgtttgcagaccccatgcaccagctggaggggccgtaactgcaggactgcgcctactgagtgacccatttcctccaggaggaaaggcaagacacgcttacacggccatttgtctcttttcccaatgcggcggtgcactttcgctcttgggggctgcaccccagacatagctggcaccagagcagggtgctcaggtggtgggtgctcagggccctgccccaggccactgggccgttttgatgacctcgaaggtcacaggcagaaaataggagcaggatttcccctggggaaaagttctcctgggacatcttctgctcttctgtacatttctagatgcaaataactccttcaccaggcagtgagtggcgtaggctctggagccaggctgcctgggctccaatgccagctctgccacttgctagctgtgagactgtggacaaaccactcagcctctgtgtgcctcagttttcctatttgtaaaatagaggccatagtggtacctattttgaagactaagtaaaagaattcaaataaagagacttggc

SEQ ID NO: 122 - protein, 528 aa, Homo sapiens
MDHCGALFLCLCLLTLQNATTETWEELLSYMENMQVSRGRSSVFSSRQLHQLEQMLLNTSFPGYNLTLQTPTIQSLAFKLSCDFSGLSLTSATLKRVPQAGGQHARGQHAMQFPAELTRDACKTRPRELRLICIYFSNTHFFKDENNSSLLNNYVLGAQLSHGHVNNLRDPVNISFWHNQSLEGYTLTCVFWKEGARKQPWGGWSPEGCRTEQPSHSQVLCRCNHLTYFAVLMQLSPALVPAELLAPLTYISLVGCSISIVASLITVLLHFHFRKQSDSLTRIHMNLHASVLLLNIAFLLSPAFAMSPVPGSACTALAAALHYALLSCLTWMAIEGFNLYLLLGRVYNIYIRRYVFKLGVLGWGAPALLVLLSLSVKSSVYGPCTIPVFDSWENGTGFQNMSICWVRSPVVHSVLVMGYGGLTSLFNLVVLAWALWTLRRLRERADAPSVRACHDTVTVLGLTVLLGTTWALAFFSFGVFLLPQLFLFTILNSLYGFFLFLWFCSQRCRSEAEAKAQIEAFSSSQTTQ

SEQ ID NO: 123 - DNA, 3567 bp, Rauttus sp.; identical to SEQ ID NO: 99
  CDS (925)...(2832)

SEQ ID NO: 124 - protein, 636 aa, Rauttus sp.; identical to SEQ ID NO: 100

SEQ ID NO: 125 - DNA, 2715 bp, Homo sapiens
aacttcctcggccgagccgggccgcgccgccgctgccgccgccgcgcgcggcgttacatccttactattcaaagtgccatccacagacctgctgatgggcagcatgagcaccacctgggagcttgctgcgctgtagaatcttgaggggtctccatccagatcagctgaatcagagtttgcattgttaacaagattctgcttctcagaagatgcactattatagatactctaacgccaaggtcagctgctggtacaagtacctccttttcagctacaacatcatcttctggttggctggagttgtcttccttggagtcgggctgtgggcatggagcgaaaagggtgtgctgtccgacctcaccaaagtgacccggatgcatggaatcgaccctgtggtgctggtcctgatggtgggcgtggtgatgttcaccctggggttcgccggctgcgtgggggctctgcgggagaatatctgcttgctcaactttttctgtggcaccatcgtgctcatcttcttcctggagctggctgtggccgtgctggccttcctgttccaggactgggtgagggaccggttccgggagttcttcgagagcaacatcaagtcctaccgggacgatatcgatctgcaaaacctcatcgactcccttcagaaagctaaccagtgctgtggcgcatatggccctgaagactgggacctcaacgtctacttcaattgcagcggtgccagctacagccgagagaagtgcggggtccccttctcctgctgcgtgccagatcctgcgcaaaaagttgtgaacacacagtgtggatatgatgtcaggattcagctgaagagcaagtgggatgagtccatcttcacgaaaggctgcatccaggcgctggaaagctggctcccgcggaacatttacattgtggctggcgtcttcatcgccatctcgctgttgcagatatttggcatcttcctggcaaggacgctgatctcagacatcgaggcagtgaaggccggccatcacttctgaggagcagagttgagggagccgagctgagccacgctgggaggccagagcctttctctgccatcagccctacgtccagagggagaggagccgacacccccagagccagtgccccatcttaagcatcagcgtgacgtgacctctctgtttctgcttgctggtgctgaagaccaagggtcccccttgttacctgcccaaacttgtgactgcatccctctggagtctacccagagacagagaatgtgtctttatgtgggagtggtgactctgaaagacagagagggctcctgtggctgccaggagggcttgactcagaccccctgcagctcaagcatgtctgcaggacaccctggtcccctctccactggcatccagacatctgctttgggtcatccacatctgtgggtgggccgtgggtagagggacccacaggcgtggacagggcatctctctccatcaagcaaagcagcatgggggcctgcccgtaacgggaggcggacgtggccccgctgggcctctgagtgccagcgcagtctgctgggacatgcacatatcaggggttgtttgcaggatcctcagccatgttcaagtgaagtaagcctgagccagtgcgtggactggtgccacgggagtgccttgtccactgtccccctgtgtccaccagctattctcctggcgccggaactgcctctggtcttgatagcattaagccctgatggcgccggtggcgcggtgggcatggttcttcactgagagccggctctccttttcttaaagtgtgtaaatagtttatttataggggtaagaatgttctcacaccatttcacttcctcttcctctcctccagcattctcctctgagcagccttagatagtgtccatggctggagccgaccctttgagtccccttgagtgtcttaagaaccagcccacaacagcctctctttctcctccacatactgcagcctccctccatgcatcccacatacaagcactcccccactccccagcgtggcctcactgtcttctggtcttggtgctactgaaattgtcacccagaatttgaatcctgaccctccccactgcaagcccagggagccccagcccaagatggccagcctgaaactgttggccagggctcctcttgtggccatgtacccagggctggctggcctgccatttgcctctccccggagacagccgttcttctgcaaccacaccccgtgcctagccacaaccccaggctgcagctgctcagaagctccaggcattttgtttctggtgaccgcccctaatgggatatcggtgatcactggtccacccttcctgtcagggcttttctggggctgctcttggaaatgaagtcttaagtactgaataactcccctggggatagctggggcatttgtctagctgggctactttctaacactttgccatagctcagaccacttctcatcgttcagggatggactgcaaccttaatttacttgccggagtgtacattctagtgtggtgtatactggtggctgttgatgatgatttttttttttttttttacacaattctctgtagactaggagaagaatgcttgtgtttttcggaagtgtgatgcttctctttgactgccaaactcttttatggaatatatctttatattaatgcaaaaaaaaaaaaaaaaaaaaaaaaaaaaaaaa

SEQ ID NO: 126 - protein, 270 aa, Homo sapiens
MHYYRYSNAKVSCWYKYLLFSYNIIFWLAGVVFLGVGLWAWSEKGVLSDLTKVTRMHGIDPVVLVLMVGVVMFTLGFAGCVGALRENICLLNFFCGTIVLIFFLELAVAVLAFLFQDWVRDRFREFFESNIKSYRDDIDLQNLIDSLQKANQCCGAYGPEDWDLNVYFNCSGASYSREKCGVPFSCCVPDPAQKVVNTQCGYDVRIQLKSKWDESIFTKGCIQALESWLPRNIYIVAGVFIAISLLQIFGIFLARTLISDIEAVKAGHHF

SEQ ID NO: 127 - DNA, 1608 bp, Homo sapiens
gcactctaacgaaatcaaaagtagaaattatgtgatacactacagatgggtttatgggagagagacagcacaaacccccaaacttgggccttcagacaaagaaaggctttggccctacataagagtgttgccaactaaatatgtatttgctctaaacttaataggcttagggaggcatcgtgtatgtataaactatacatacatacatacatatgtgtttatacatacacaatgcctataatgattcttcacttaatttttcaaatttctcatcaagtattggtcttaattgttccttttaagagtgcttctgtaagtattaaatctaacttatatattccattaatttgtaatttaattgcgtgtccaatgtacagcagtaacaatcagaatcttcacaaaggccagtgccattttgtaaaatctttttaaaggattaattcagttatgttataattaagtataaacatcgatatgaatactttcaagtctccagttcatattactatatgtcaagtggagaattaatttttttttaatttggtaaactagtagtttagatagcttcagtgtaggtagtccctaaaaatatctgggtagactgtgaaattgtctcatatgccttgataatttcagtttttaaaaggagtagcttaatatttctattttctgttcttttactcagacattattattattattattattattattattattttttattattattattttacaaattgtatttagtatgtgtttttgaaacacaaaactggcatgctggtgtatctggtgaatttactattaagcccaggtctgcaccagatgggcaggtgaaaatgtgattatgaggtgtgtggcgttatatccatctctgtaatacttgactctccaggtgacttgtacgtctgttacattcatgaattcactttacggttattcttacagatactgaaagaagcaaccttacaccacgcaaggtctatggaaaacaaaaacttccctcctttaacacaatcacaataaatgtttcataacaaccagataaatagaaacatgtcagcattttccccggcaggttcagaagtttgatgctgaaatactggtttgcacatctagaccaagactaaagtgagtttgctatttcaaaggaaaatgcaaattgaggcttaggctgcacctttctgtatcactgttttggtaagtccacatggggcagacaaagccaaacaccagctaggtggtagaattccccaaatattcatctgtgctgaaaccttcaaaagtcaggtgcctggagagctcatttaatgaaagggttatctctgccaaccagtcagtagttgatatttttttcaccagaagttgtgaaatattatttatgtatgtagaagacaggggcttcctgccgttgttgtttacttgtgtgtttgggcaagtttcctcctttccagaaagcaagttttccataaaagcaactttgcaatggccctactccttttgtttgataccccaggcaaaaagcttttcatggtattgaaataattttcatttaaaaacagggagctcagatgaaccagtcctttattaaaaaaaaaaaaaaaa

SEQ ID NO: 128 - protein, 82 aa, Homo sapiens [sequence omitted]

SEQ ID NO: 129 - DNA, 1338 bp, Homo sapiens
gtggatcttcacagtgcacggctttgggcggcccctgctgctgtcggccctgcacatgctggtggcagccctggcatgccaccggggggcacggcgccccatgccaggcggcactcgctgccgagtcctactgctcagtctcacctttggcacgtccatggcctgcggcaacgtgggcctaagggctgtgcccctggacctggcacaactggttactaccaccacacctctgttcaccctggccctgtcggcgctgctgctgggccgccgccaccacccgcttcagttggccgccatgggtccgctctgcctgggggccgcctgcagcctggctggagagttccggacaccccctaccggctgtggcttcctgctcgcagccacctgcctccgcggactcaagtcggttcagcaaaacagggtctggctctgtcacccaggctgcattggtgagatctcagctcaatacagcctccgcatcctgggttcaagtgattcttctgcctcagcctcccaagtgccctgctgcaggaggagaggctggacgcggtgaccctgctttacgccacctcgctgcccagcttctgcctgctggcgggtgcagccctggtgctggaggctggcgttgccccaccgcccactgctggcgactctcgcctctgggcctgcatcctgctcagctgcctcctgtctgttctctataacctggccagcttctccctgctggccctcacctctgccctcaccgtccacgtcctgggcaacctcaccgtggtgggcaacctcatcctgtcccggctgttgtttggcagccgcctcagtgccctcagctacgtgggcatcgcactcactctttcaggaatgttcctttaccacaactgcgagttcgtggcctcctgggctgcccgtcgggggctgtggcggagggaccagcccagcaagggtctttgagacctgggggatctcaggagccacctgggatggccctggcctgaatccagcctccgctgtggccatagaaggaatggagaacagggctgggcatggtggctcacgcctataatcccagcacttccagagtccgaggtgggtggatcacctgaggccaggagttcgagaccagcctggctaacatggcaaaacctcatctctactaaaaatagaaaaattagctgggcatggtggcgcgtgcctatagtcccagctacatgggaggctaaggtgggaggatcacttgagccctggagatcgaggctgcagtaagccaagatcgcatgctactgcactccagcctgggagacagagcgagacgctgtctcaattaaaaaaaaaaaaaaa

SEQ ID NO: 130 - protein, 165 aa, Homo sapiens
MLVAALACHRGARRPMPGGTRCRVLLLSLTFGTSMACGNVGLRAVPLDLAQLVTTTTPLFTLALSALLLGRRHHPLQLAAMGPLCLGAACSLAGEFRTPPTGCGFLLAATCLRGLKSVQQNRVWLCHPGCIGEISAQYSLRILGSSDSSASASQVPCCRRRGWTR

SEQ ID NO: 131 - DNA, 983 bp, Homo sapiens
cggacgcgtgggtgtttgatctgccttttgtgcgtggggtgggagttaggtaggaatcttaaagtggagagccagtttcttcccaaattactgacctaacccatccttaacccccagttcaaggccacctttgtgatagtgaagcttccacatgctcactcagccccttctgctctctcttcttctctactgtgcatgtcggcttgtacttttgccagtttctctaaagacacaaccagaggtggggtggctgtgtgtgcacaacttcaactttacatgtggggctgagtccctatgttgtatatccttgtgcaaaagcacaatatgttaattgctatagcttttaaaaaaataattaatagtttttcataatcaaattttcttgcttttttgttttttcaaaaaagcatacttttattgaagaataaaccccttatatatgtacacttatttataactatgaaccatgaactaggatagaaatgcattgtgtatattacaaaacataacaaaaataataggggtagggaggtgcagatgttggtcaaaggatataaacctgcagttctatgatgaataagttctggacatctggaatacagcatggtgactatacttagtaatactatattgtacacttgaagcttactgaaagagtaaatctcaagtgttctcaccacacaaacccaaaggtaactatgttctcaccacacaaacccaaagggaactatgtattaattagcttgattgtggtaaccatttcacaatgtatacatttgccaaaacattatgttgtatacctggaatatataattttatttatcaattatacctcaataaagctgaaagaggggattactaattcccacaaaatacagatttaacaaaaacttttattcaacaaacagtgctatgaagttgtaaattggaaacaaaagaaataaaatttcatccacagtcttctcatcaaaaaaaaaaaaaaa

SEQ ID NO: 132 - protein, 59 aa, Homo sapiens
MLTQPLLLSLLLYCACRLVLLPVSLKTQPEVGWLCVHNFNFTCGAESLCCISLCKSTIC

SEQ ID NO: 133 - DNA, 1119 bp, Homo sapiens
ggaaccctcctgtccccctgccctctctgctcacatcatctgctgccctagactttggaggcttgaatttctgcacgaggtgactgccaacaaatgacaagagcagccatttagtgagcacgtaattcatttaatggtgctgaacacagagcaagtgctgcatgagtattttggttagggttcacttgtaccttttaggtttagctcttatgcaaagcctgtggttcagatccatgtgtcaccctcaggtcactacgtcccactgcagcaggtatggggagaatcataaccataacaccttcccttgcagtgaatttctctctcatatttgtctttagtttgaaccacataataaatctataagcgtattatagttcctattctatagatgaggagactgaggcacactaagggaaaaagtgacaaggaagagactagaggctacatctgattttacaccaagtattcatcccacacaatgaatagcaaccaccggatgtttttcaagatttgagtgaaggccagaatcaaactgaagactatgtgtgtgtgtgtatgtgtgttcatattcaaaaacactacatacacgctacatgtattatatatattatataatatacacacataataacatataacatataagtatataataggtaattatatatttttatattaataatataatatatattatatatataatatacacacatatacatactttctataaatctactccaaaagcttcaaggtctcccaaatatcacatgacccatagctaaggcaatcctgaaacctggctgcttgggctagcctggggacacacgaggagtcaggaactgggctgtccttccttgcaatgctctctccttctgccaaaacttatctttctgatctgcctttccccccaggatccagggtggtcctaggaaacccaaggaaacgcttccagctggagtgctcggaggtgtaggacattgttctcttcccttcccgggtcctgttgttttagaacctaatcaataaaaattaagctggtaaaaaaaaaaaaaaaaaaaaaaaaaaaaaaaaaaaaaaaaaaaaaaaaaaaaaaaaaaaaaaaaaaaaaaaaaaaaa

SEQ ID NO: 134 - protein, 58 aa, Homo sapiens
MSILVRVHLYLLGLALMQSLWFRSMCHPQVTTSHCSRYGENHNHNTFPCSEFLSHICL

SEQ ID NO: 135 - DNA, 1386 bp, Homo sapiens
cggacgcgtgggggggagaatagtcacagcctcctcaaagggttgtgaaaatcaaatgtgataatttgtggaaagcccttagcagtggcctggcacaaaacaaatgctcagtggatggaagctgcctattattattgtcgttgttgttgtttgccatgactgctctgggccgggggtagagctagcatccgggcatgtacgagggaagagggaggcaggcctctattcaaaggcagaaattcctttaagattgtggtctgctgggtttcagggagtgtctgtgttgtttgtttttgtttgtttgtttgttttgagacagggtctcgctctgtcacccaggctggagtgtagtggtgcagtcttggctcactgcaacctccacctcctgggctcaagcgattctcatgcctcagcctcccgagtagctgggactacaggtgtgtgccactatgcctggctaatttttgtattttttgtagagacggggttttgccatgttgcccaggctggaagtgtctatgtttaactgcatcttataaaccagcaacaagttttctactgggaattagaatggtgcatacacaatgtattattatcactgtcagatgagcatgcttgaatgtagcatgactgcctctttttgcttttcctagaggttttttttttgcttgttactcatctgttgacctacctgggggaagtagcacccttgcatttcaaaaataaaattgatggcattacaaatggaatagaaaccatttttaaaatattttcagttctctttcaaaattacctattttatcttttatatatttgaacatattaagcatagttattttaaagttcagttagtcccttatatggagcctccatgagtctgtttctagtgcctgttgtttctcttgttttttgttagttttgtcctgtctcctcccatacttggcaatgttttaattgagtacaagtaatttcaggtctaggatggagttatcttcctctatgaggattatgtttacatctggcaggtggctggggatgcagtgagccagatctctttcatctacttgtaggggatgagaggatttgagtcactttaagggctgacctacttctgtttcattcatattcatagggtgaagcccactggggctccaacccaaagcatgaaacatttgccaggtagccttcctgttggtgggctttgcagtgtcttctagaatcagcagaccccctacagaaaacgtagtcccagatgccatgcatatgtctctgagttgccttcttttcccagatcttggccttgtaattcttcactgctttgtttcctgcccaatactctcaattagacttaaatatatatatatacgtacaaaaaaaaaaaaaaaa

SEQ ID NO: 136 - protein, 140 aa, Homo sapiens [sequence omitted]

SEQ ID NO: 137 - DNA, 1196 bp, Homo sapiens
agcatctctagacctagaggttttctctatttctccttttcactgtgacccaggaaataattttcagaagtaaaaaaatctcatctgagactctgcaacaggcaccagagagtgaggaagaactttgagtaacagaaactgctccaatttctcatccgcatctcacatctctgtgtcaactatccttctatcccatttattctggtattagatatgttgtcagtgtctcttgttaggtagagaaatcagcagtcagatcttaagaccatttggtaggtgcatcaggaattgacacgcaggccagttttccagtcctacatgtattcttttctctgtatcctgcctctcttgctcttggcttcctgccttctctcctactcatttttagaacagtctagatgcaggcagctagaagagttatttcctccaagctgtctaggaaaagggacaattaaagagagattctgcacttattatgatataaaaaaagaaaaacaatgagagaacatagtactcttttacctgtgacgttaaatgggagtcacacaggtttagctatctgttctaggagtggatgaacagactattctcccatgtcacttctttcctcctggacaccttcagggagacagctgggtgaagaatcatacttctgacctctgtcaaacagggtcagatgccgcagaggttctgagatgataaaggaagtgacagagggaacctgaggtaccacatttctgatttgtcatgaaagtcttaccttgcttaagatgacttttttaatgttcctttcagggaaaatgccaagtggaataaaaaccaacatcaagtcggcttccatgcatccctaccagcggtgagtgtggctggcaacctcgactccctggtgctctttgcagagttgggcagtgaaattaccttttgctcaaggctcacctagatgggtacaataaaaagaacatgggctttcagcagcagacaaatcccacttccaccactgactagctgtgtgaccttggacaagtgacctaatttttctgagcctgtttctcatttgtaaatggtgataatacctacctcatagggttgttgtgaggattaaaatgaggaaatgaatgtaaagcacttagtacagtatatgaaataatgggtattcaataaatgatagtttctacagaaaaaaaaaaaaaaaaaaa

SEQ ID NO: 138 - protein, 60 aa, Homo sapiens
MYSFLCILPLLLLASCLLSYSFLEQSRCRQLEELFPPSCLGKGTIKERFCTYYDIKKEKQ

SEQ ID NO: 139 - DNA, 3649 bp, Homo sapiens
  modified_base all "n" positions: n=a, c, g, or t
ggcgggctgaggagccgccgggctcgggctccgcgcggggatgtgtctggccaccgcgtactttcgagggcgcctcaacacccggggactgatgcccttggccagacgcacccccaactgctgtctgctcaggtgtagcccgcgtgactgagtcaccgctgctccagctgtttcacgtcgccgttccctttactgaatagtttgatggggcgccgggcggatgacagcgggaacggttgtgatcactggcggaatcctagctacggtgatcctcctctgcatcattgccgtcctgtgctactgcaggctccagtattactgctgcaagaagagcggaaccgaggttgcagacgaggaggaggagcgggagcacgaccttcccacgcatcccagaggccccacctgcaatgcctgcagctcccaagccctggacggcagaggcagcctggcgcctctcaccagcgagccctgcagccagccctgtggggtggccgcgagccactgcactacctgctccccatacagctcccccttttacatacggacggctgacatggtgcccaatgggggtggaggcgagaggctctcctttgctcccacatactacaaagaggggggacccccatccctcaaattggcagcaccccagagttacccggtgacctggccaggctctgggcgtgaggccttcaccaatccaagggctattagtacagacgtgtaaatccttccaccccgacccgcacacacacccacactgctgccctggcgggggccatgggggtgatgaatgaccctccaacagccccacatgggttgtttctgtttctttggcttttctcgctccgcagtggagggtttactaggatttaagcttttgagtgcattgagaaccaagacagggcctggctccaactctgtgggccagaggtgggggactgctaggtcgagtctgcagcttcgccagtttcttggttgggacactcctctggcagccccagcaccaccacaaccccttgcagtgtgccccagtcccctggattcgctggactgcaaaaaggagcaccagggaaagctcagcaaaggctcaggaggcctcccgggtcctcgggagatgaagcatccgtgcctaggaaaaggggacagagggcaaggagagaagtgagagctacaattccagcattggagaagcgaggggcggggcgtcaacggcactgcttcaggacgcgcttgctgaaacgactccaacagctagttcacagcccagctttgtacgttggttaccatagctactgctgtcactgtagctgctcccgtagggacgttgattcctgaacgtatcacatctcacctgcccccttcctcgtgggacgtgtcaagttgactttaaagcctaaggtggcttgtggggactgcaccagaaagtgtctaaccttgtgttccccgaaatcctttctctgacttaggaaccagcgccccctgctggagaagttttttcattttgttagccgacttctggtagcttagcaaagagaccagctgactgtctctcggcccagcccaccacgccgagtagcttgtgtggatgcagtcctgtgagggtgtgcataaccgttcccaggtgtacgcacgcgcgcgcgcgcacacacacacacacacacacacacacacacacagtaaccacgggtaggcaccaggggctttgtacattcaggagctgcagagaggaaaggtctcccatgtaccagagaaggaaaagtctgatcccgaaacagcttgaacgaaaggtggttaacacgtgaccaatccccatggcagacagcgggctggtgaacaggaagagcacagaatctctgtggggcgatgctgcagcggctgaaaccacgtcaagtcccccagagcccggcattctatgtaagcatccacctgtgacgccgtggagcaggatcttcattcatctcaccagagcaacagcccagtcctgaggatgggagggacgtgacttagccttgggattccacgctcgccgccctcccttggccgccctactccccagtttcctggcgatgagccatttattgtgtctcacaccagcctcatttccaactccgacttcctacttagaatgtggcagtggctttgtgagtgagaatcctgatgagttttccagtggcctctgcagaagctggcccccttctaagggcatagctaacccccttcccactcctgagtcactgaattcgaggagggtggggcagggaaagggctggcccccctgctgaaatcttgattctgcatttgaggaaggtcagggtgccgctgggggagcagggagcggggagggaggaagaggggaatgcacatcttttgcgccactattaaggcacctgtcaccttacatctcaatctggaatcaaagtgccctgggttgagaagcagacctgggctctggtcacactttggtcactcattagctctaggaccagtcactaatctctgagactccattttctccagggaaacgaggcttgcccagatagactaacaaccctttagtgctccaagaagtgagaatttccgaaaaagatctgccggcccagagcactccctcttgccctaatcctggcagggtctggatgtatttactcaactctgatcttgcgtgcagggatgcttgctgatggatgaaagaccacaataaaacaagattagcagcaaaacaattttaattgtcagtgaaaagcaaacatgtttgtcagactctcctgtggagtcatttcaaatggtaactcttctcttgtaccaggaagcagctgtaggtggggtaatgggatctgtctcctggtgcagaggggcagcttatggcggcagcagcttcaacaagcccgtcccacggccagccctaactgggccaagtgcaagctcctgatgagctgctgggcctggcagcgttccccacttcctagtgccttgctcccctggaattccacagccaatcaaccacagcagccgtgtcctccttgccagaaataacatcattcgtacgtcctgcctttgtaaaaatcaagacccagttaaccatcacccacttcttgcccctgattgatggggtccctgagtacaagcatcctgtgcaatcccctccctcctaccgctttcctagctaagccctgctagccccacaaatcagaatctgggtttggggtgctggagagatggtgggccccagctcttccccacatagcccacgctgctcagggcacggtctccaaccaggctcaagattgcctgcctgcccgctgcagccgcagggccccaccctgtggaaaaggaagcttcccccactcaactgcactgtccttttctgctgtctagtctgtgctaagggacactatttgtacacttttcaaacggtgccctaaattggaagagaaggaggggccaggaacacagccctctccgccgtctttctccacctccacttcaccactcctgctctagacttcttgtcttgcatctttgataacttggagtcataaccgagtggatgtcggaataaatgagagatttgaagtngaaaaaaaaaaaaaaaaaaaaaaaaaaaaaaaaaaaaaaaaaaaaaaaaaaataaaaaaaaaaaaaaaaaaaa

SEQ ID NO: 140 - protein, 167 aa, Homo sapiens
MTAGTVVITGGILATVILLCIIAVLCYCRLQYYCCKKSGTEVADEEEEREHDLPTHPRGPTCNACSSQALDGRGSLAPLTSEPCSQPCGVAASHCTTCSPYSSPFYIRTADMVPNGGGGERLSFAPTYYKEGGPPSLKLAAPQSYPVTWPGSGREAFTNPRAISTDV

SEQ ID NO: 141 - DNA, 2021 bp, Homo sapiens
  modified_base all "n" positions: n=a, c, g, or t
ctgactttgatggtccaggctcagccgtgctgctcttcctggccatgccaatgctcaccattgggggaatcctgtttctcatcaccaacctgcagattgggaacctatttggccaacaccgttcgaccatcatcactctgtacaatggagcatttgactcttcctcggcagtcttccttattattaagcttctttatgaaaaaggcatcagcctcagggcctccttcatcttcatctctgtctgcagtacctggcatgtagcacgcactttcctcctgatgccccgggggcacatcccatacccactgccccccaactacagctatggcctgtgccctgggaatggcaccacaaaggaagagaaggaaacagctgagcatgaaaacagggagctacagtcaaaggagttcctttcagcgaaggaagagaccccaggggcagggcagaagcaggaactccgctccttctggagctacgctttctctcggcgctttgcctggcacctggtgtggctgtctgtgatacagttgtggcactacctcttcattggcactctcaactccttgctgaccaacatggccggtggggacatggcacgagtcagcacctacacaaatgcctttgccttcactcagttcggagtgctgtgtgccccctggaatggcctgctcatggaccggcttaaacagaagtaccagaaggaagcaagaaagacaggttcctccactttggcggtggccctctgctcgacggtgccttcgctggccctgacatccctgctgtgcctgggcttcgccctctgtgcctcagtccccatcctccctctccagtacctcaccttcatcctgcaagtgatcagccgctccttcctctatgggagcaacgcggccttcctcacccttgctttcccttcagagcactttggcaagctctttgggctggtgatggccttgtcggctgtggtgtctctgctccagttccccatcttcaccctcatcaaaggctcccttcagaatgacccattttacgtgaatgtgatgttcatgcttgccattcttctgacattcttccacccctttctggtatatcgggaatgccgtacttggaaagaaagtccctctgcaattgcatagttcagaagccctcacttttcagccccgaggatggttttgttcatcttccaccacctttgaggacctcgtgtcccaaaagactttgcctatcccagcaaaacacacacacacacacacacacacacacaaaataaagacacacaaggacgtctgcgcagcaagaaaagaatctcagttgccaagcagattgatatcacacagactcaaagcaaaggcatgtggaacttctttatttcaaaacagaagtgtctccttgcacttagccttggcagacccttgactccaggggagatgacctgggggaggaagtgtgtcaactatttctttaggcctgtttggctccgaagcctatatgtgcctggatcctctgccacgggttaaattttcaggtgaagagtgaggttgtcatggcctcagctatgcttcctggctctccctcaagagtgcagccttggctagagaactcacagctctgggaaaaagaggagcagacagggttccctgggcccagtctcagcccagccactgatgctggatgaccttggcctgaccctggtctggtctcagaatcacttttcccatctgtaaaattgagatgaattttggtgttgaaagttcttcctggagcagatgtcctagaaggttttaggaatagtgacagagtcaggccaccccaagggccatgggagccagctgacctgcttgaccgaaggatttctgacagactatctttggggatgttttcaagaagggatataagttatttactttgggcatttaaaagaaaatttctctcgggaataattttatagaaaaataaagcttctgtgtctaaggcaaaaaaaawaaaaaaaaaaaaaaaaaaaaaycmaaaaawaaaaaaanaan

SEQ ID NO: 142 - protein, 362 aa, Homo sapiens
MPMLTIGGILFLITNLQIGNLFGQHRSTIITLYNGAFDSSSAVFLIIKLLYEKGISLRASFIFISVCSTWHVARTFLLMPRGHIPYPLPPNYSYGLCPGNGTTKEEKETAEHENRELQSKEFLSAKEETPGAGQKQELRSFWSYAFSRRFAWHLVWLSVIQLWHYLFIGTLNSLLTNMAGGDMARVSTYTNAFAFTQFGVLCAPWNGLLMDRLKQKYQKEARKTGSSTLAVALCSTVPSLALTSLLCLGFALCASVPILPLQYLTFILQVISRSFLYGSNAAFLTLAFPSEHFGKLFGLVMALSAVVSLLQFPIFTLIKGSLQNDPFYVNVMFMLAILLTFFHPFLVYRECRTWKESPSAIA

SEQ ID NO: 143 - DNA, 1477 bp, Homo sapiens
tgggctacacagccaggtgtcagatgtgtctctgctgatctgagtctgcctgtggcatggacctgcatcttccctgaagcatctccagggctgaaaaatcactgaccatggcaccatggtctcatccatctgcacagctgcagccagtgggaggagacgccgtgagccctgccctcatggttctgctctgcctcgggctgagtctgggccccaggacccacgtgcaggcagggaacctctccaaagccaccctctgggctgagccaggctctgtgatcagccgggggaactctgtgaccatccggtgtcaggggaccctggaggcccaggaataccgtctggttaaagagggaagcccagaaccctgggacacacagaacccactggagcccaagaacaaggccagattctccatcccatccatgacagagcaccatgcagggagataccgctgttactactacagccctgcaggctggtcagagcccagcgaccccctggagctggtggtgacaggattctacaacaaacccaccctctcagccctgcccagtcctgtggtgacctcaggagagaacgtgaccctccagtgtggctcacggctgagattcgacaggttcattctgactgaggaaggagaccacaagctctcctggaccttggactcacagctgacccccagtgggcagttccaggccctgttccctgtgggccctgtgacccccagccacaggtggatgctcagatgctatggctctcgcaggcatatcctgcaggtatggtcagaacccagtgacctcctggagattccggtctcaggagcagctgataacctcagtccgtcacaaaacaagtctgactctgggactgcctcacaccttcaggattacgcagtagagaatctcatccgcatgggcatggccggcttgatcctggtggtccttgggattctgatatttcaggattggcacagccagagaagcccccaagctgcagctggaaggtgaacagaagagagaacaatgcaccattgaatgctggagccttggaagcgaatctgatggtcctaggaggttcgggaagaccatctgaggcctatgccatctggactgtctgctggcaatttctttttttctttcttttcttttctttctttttttttttttttttttttttgagatggagtcttgctctgtcaccaggctggaatgcagtggcgcaatctgggctcactgcaacctccgcctctcgggttcaagtgattctcctgcctcagcctctggcaatttctagagggaggaatgggtgtttgagtgcagagacactggtctggggtgatccatggaggaccattaaaatgtgacacctttcctttctaaaaaaaaaaaaaaaaaaaaaaaaaaaaaaaaaaaaaaaaaaaaaaaaaaaaaaaaaaaaaaaaaaaaaaaaaaaaaaaaaaaaaaaaaaaaaaaaaaaa

SEQ ID NO: 144 - protein, 299 aa, Homo sapiens
MAPWSHPSAQLQPVGGDAVSPALMVLLCLGLSLGPRTHVQAGNLSKATLWAEPGSVISRGNSVTIRCQGTLEAQEYRLVKEGSPEPWDTQNPLEPKNKARFSIPSMTEHHAGRYRCYYYSPAGWSEPSDPLELVVTGFYNKPTLSALPSPVVTSGENVTLQCGSRLRFDRFILTEEGDHKLSWTLDSQLTPSGQFQALFPVGPVTPSHRWMLRCYGSRRHILQVWSEPSDLLEIPVSGAADNLSPSQNKSDSGTASHLQDYAVENLIRMGMAGLILVVLGILIFQDWHSQRSPQAAAGR

SEQ ID NO: 145 - DNA, 5058 bp, Homo sapiens
agacctcgaccttcacaggactcttcattgctggttggcaatgatgtatcggccagatgtggtgagggctaggaaaagagtttgttgggaaccctgggttatcggcctcgtcatcttcatatccctgattgtcctggcagtgtgcattggactcactgttcattatgtgagatataatcaaaagaagacctacaattactatagcacattgtcatttacaactgacaaactatatgctgagtttggcagagaggcttctaacaattttacagaaatgagccagagacttgaatcaatggtgaaaaatgcattttataaatctccattaagggaagaatttgtcaagtctcaggttatcaagttcagtcaacagaagcatggagtgttggctcatatgctgttgatttgtagatttcactctactgaggatcctgaaactgtagataaaattgttcaacttgttttacatgaaaagctgcaagatgctgtaggaccccctaaagtagatcctcactcagttaaaattaaaaaaatcaacaagacagaaacagacagctatctaaaccattgctgcggaacacgaagaagtaaaactctaggtcagagtctcaggatcgttggtgggacagaagtagaagagggtgaatggccctggcaggctagcctgcagtgggatgggagtcatcgctgtggagcaaccttaattaatgccacatggcttgtgagtgctgctcactgttttacaacatataagaaccctgccagatggactgcttcctttggagtaacaataaaaccttcgaaaatgaaacggggtctccggagaataattgtccatgaaaaatacaaacacccatcacatgactatgatatttctcttgcagagctttctagccctgttccctacacaaatgcagtacatagagtttgtctccctgatgcatcctatgagtttcaaccaggtgatgtgatgtttgtgacaggatttggagcactgaaaaatgatggttacagtcaaaatcatcttcgacaagcacaggtgactctcatagacgctacaacttgcaatgaacctcaagcttacaatgacgccataactcctagaatgttatgtgctggctccttagaaggaaaaacagatgcatgccagggtgactctggaggaccactggttagttcagatgctagagatatctggtaccttgctggaatagtgagctggggagatgaatgtgcgaaacccaacaagcctggtgtttatactagagttacggccttgcgggactggattacttcaaaaactggtatctaagagagaaaagcctcatggaacagataacatttttttttgttttttgggtgtggaggccatttttagagatacagaattggagaagacttgcaaaacagctagatttgactgatctcaataaactgtttgcttgatgcatgtattttcttcccagctctgttccgcacataagcatcctgcttctgccagatcaactctgtcatctgtgagcaatagttgaaactttatgtacatagagaaatagataatacaatattacattacagcctgtattcatttgttctctagaagttttgtcagaattttgacttgttgacataaatttgtaatgcatatatacaatttgaagcactccttttcttcagttcctcagctcctctcatttcagcaaatatccattttcaaggtgcagaacaaggagtgaaagaaaatataagaagaaaaaaatcccctacattttattggcacagaaaagtattaggtgtttttcttagtggaatattagaaatgatcatattcattatgaaaggtcaagcaaagacagcagaataccaatcacttcatcatttaggaagtatgggaactaagttaaggaaatccagaaagaagccaagatatatccttattttcatttccaaacaactactatgataaatgtgaagaagattctgtttttttgtgacctataataattatacaaacttcatgcaatgtacttgttctaagcaaattaaagcaaatatttatttaacattgttactgaggatgtcaacatataacaataaaatataaatcacccatttgcttgacattatgatatgataatccacaaagaaggggaagatgggaaaaatgttactagtcaatttattgtaaatttttttaaaaatttgaggctaggatgaaaattaatttaataacaatcagcatgcttatgtactaaaataattgcgttgtggaatgggagggaacgaagagttcaaacaattgactggaaaggttttattcgtctaagactttcccaaacagcaaatccttgaagggaatgagatccaggtgttagtgtacagtctagtgatgcaactgaactggggctcagacctctattttgagatgattgtagatatttttcttcccctgctgctgtgtttacagttcatacatggttaatggtcctgttagactcctcttcgctgagatggaaagataccatagagaaaatatcctggaagctgcctcactgctgcatctagtgtgacactgaatggctaactgcctggataacaaaactgaagagtaaaagcatgatattggccaccttcatgatttttagttttggtaaattattactgagctgttagagacacagctttcaagtaatccagaccgtaatgaagttaggactggtaccatgatgtacggcatgttaatggtgagatttcaccaagtctgtcctcattgcatatagctactcatataagttctatattgtacaataattaccctgaaaaccagtattgccacgaaaaatttaagtttattgatctgaataacactggagtatgaactgataacatttaggcacttggcaaaaatatgaaaactgacatgaattgatagtgctaaatattttgcataagctatttttgtttcatttagcaaaatgctctgggaaaaaacaaaattgaggaaaaccttgaattttaagcaaggatataagtacctttaaaactactctcagtgttctgttaaaaatggattcctcttgtttcagtgtattctgtagttgggcctctaggtggcacccacaagctgtaggaagctatggggaagcctgacatcaagaaggatgtctagatctgtaagtaataatgagaactgtacctgaaattagagtctcgtgaaaccaaaagaatacagtttttctttgcaaatggcgtttaaaaattaattcgtgttgatttacatcattattcgtatttttcaaatttctggacatttgattccaaactaaaataaaatttatgttgcatgatttgaggaactccctctgcaaaagcacctggagcaatttaaattaagaagaaattttaaaagcttaattttgcaatgacatcttattcctaagagaaatacttttgatatttccttctacaaaggatttgagaaatagaagtttgggtcaaagtgaaaatatgagcgatagttcaaactttatgtacatagagaaataggtaatacatttctaaaatggtaacttcttttgaaaagtaattaccaaagggttttatctgcatgtctgtgttaactgtttcattggagatagttaagaagatgtgacgataatatttattacttttttcaagagggcaggcagttcctcttctatatcttcgatctctcttcctacagcactagtaaagtactctgtatataacagtccttcaataaatgttgttgaatgactcttttatttttacattatgcagaaaacatagctttattattatttacacattgatttttaaaattaatcccagattttacactgagtgaattaagccggttactatttatctaagcctataatctcacccgtaagatagagatgatatttgctcaaatgattgttgtggaaataaaactgtgaatgtttaaaaagtgcttagcacagttcttggaacattagtaggtgttcaagagaccatagtaataataactgttgctataatgaaactacactcttgttttaaaaaatatggtatttgattataacaggctgaataccttttttttttgaaatgacaagataattagaccaacaaaatgtgctagttaaaaaaatttctgattctacaaaaagttttactgggataattccgaaacatatttatcaaagtggtctgtcaatgtgagggttcattctaacttttgacttcaattttaaaaaatgataaactttattaaccaccgagtggctggattatatcaagatctatggtgtagttcaaatgtcgcctcttccctgaagcctttttttacttcctcaagtggatgtactatacgtttcttctgaacttccttaccattaattttttttattttcagataatcattgattcagatacggttaagatataactgtaagatataattcacagagattctgtgtaccctttactcagtttacctcaatagtaagatcttgcttaggtgtagtataatattacaatgaagaagttgacattgagacaatccattaactttattaggatgcaatcaattatatatgtgtgtgtaggtgtgtgtgtaattagttctatgtaatttaattacatatgtagattcatgtgattaccaagatacagatagtttgttcacaaggctacatcacgctaccgacagccatccagctccctccctaggcctgtgtctagtctctaatccctggcaaccactaatctgctctccatctttataatttttattgtttcaagaatggtatataaatatattatacaataagtaactttttcaggttggctttttcgctcagtataattttcttgagatctgtccaagttgttgtgtgtgtcagtagttaattctttttttattactgagtagtattacatgatagggctgtacctcagtttgttaactgtatacccactgaagggcatttggattgttctcaggttttggctattacaaataaagctgctatgaagatttgtggcggccgc

SEQ ID NO: 146 - protein, 423 aa, Homo sapiens
MMYRPDVVRARKRVCWEPWVIGLVIFISLIVLAVCIGLTVHYVRYNQKKTYNYYSTLSFTTDKLYAEFGREASNNFTEMSQRLESMVKNAFYKSPLREEFVKSQVIKFSQQKHGVLAHMLLICRFHSTEDPETVDKIVQLVLHEKLQDAVGPPKVDPHSVKIKKINKTETDSYLNHCCGTRRSKTLGQSLRIVGGTEVEEGEWPWQASLQWDGSHRCGATLINATWLVSAAHCFTTYKNPARWTASFGVTIKPSKMKRGLRRIIVHEKYKHPSHDYDISLAELSSPVPYTNAVHRVCLPDASYEFQPGDVMFVTGFGALKNDGYSQNHLRQAQVTLIDATTCNEPQAYNDAITPRMLCAGSLEGKTDACQGDSGGPLVSSDARDIWYLAGIVSWGDECAKPNKPGVYTRVTALRDWITSKTGI

SEQ ID NO: 147 - DNA, 1106 bp, Homo sapiens
gccagtttcctggactggatcctgaggtgtcttagcggcctctagaccccaatccagccaacagctcttatctcaggtggacatggactgcagggtccacatgcgacccatcggcctgacgtgggtgctgcaactgaccttggcatggatcctgctagaagcctgtggagggagccgcccactccaagccaggtcccagcaacaccatgggctggcagctgatctgggcaaaggcaagctgcacctggcaggggatccccaggcctcagttcccaaaccttacctgaatatccaagaccctggctcacagggttcccctttgccaggaccttgttgtccctcagagatggacacaacagagacatcgggccctggaaaccatccagaacgctgtggagtgccgagccctgaatgcgaatccttcctggaacacctccaacgtgcccttcgcagtcgcttccgcctgcggctattgggggtacgccaggcacagccgctctgcgaggagctctgccaggcctggttcgccaactgcgaagatgatatcacctgcggcccgacttggctcccactctcagaaaaaaggggctgtgagcccagctgccttacctatggacagaccttcgcagacgggacggacctttgtcgctcggctctgggccacgccctaccggtggctgctcctggagcccgtcactgcttcaacatctccatctccgcggtacctcgtcccagaccaggacgacggggccgggaagctccctcccggcgttcccgcagccctcgcacctccatcctggacgctgcgggcagcgggagtggcagtggaagcggcagcggcccctagcggacgcgtggccctgagttgggggagcgacccttcccccagccccgcccctcaggacacccagaaccccacccctcgtcctctcggccttctgtaatagttttgagatgtctgtccctcctccctggagctccagagacccacccctctccaggttatcccagaaatgacccaactctctcacttttccctctcccctttgaataaagtcgccagctagagcaaaaaaaaaaaaaaaaaaaaaaaaaaaaaaaaaaaa

SEQ ID NO: 148 - protein, 254 aa, Homo sapiens
MDCRVHMRPIGLTWVLQLTLAWILLEACGGSRPLQARSQQHHGLAADLGKGKLHLAGDPQASVPKPYLNIQDPGSQGSPLPGPCCPSEMDTTETSGPGNHPERCGVPSPECESFLEHLQRALRSRFRLRLLGVRQAQPLCEELCQAWFANCEDDITCGPTWLPLSEKRGCEPSCLTYGQTFADGTDLCRSALGHALPVAAPGARHCFNISISAVPRPRPGRRGREAPSRRSRSPRTSILDAAGSGSGSGSGSGP

SEQ ID NO: 149 - DNA, 1085 bp, Homo sapiens
gaattcggcatgaggaggccgcatagaagagagggaggaattactgaacaggagagggggattggaagacctagggaggtccccttcattctgagaaaagaaggggtctcttgaagactaaaaagctcttatctcaggtggacatggactgcagggtccacatgcgacccatcggcctgacgtgggtgctgcaactgaccttggcatggatcctgctagaagcctgtggagggagccgcccactccaagccaggtcccagcaacaccatgggctggcagctgatctgggcaaaggcaagctgcacctggcaggaccttgttgtccctcagagatggacacaacagagacatcgggccctggaaaccatccagaacgctgtggagtgccgagccctgaatgcgaatccttcctggaacacctccaacgtgcccttcgcagtcgcttccgcctgcggctattgggggtacgccaggcacagccgctctgcgaggagctctgccaggcctggttcgccaactgcgaagatgatatcacctgcggcccgacttggctcccactctcagaaaaaaggggctgtgagcccagctgccttacctatggacagaccttcgcagacgggacggacctttgtcgctcggctctgggccacgccctaccggtggctgctcctggagcccgtcactgcttcaacatctccatctccgcggtacctcgtcccagaccaggacgacggggccgggaagctccctcccggcgttcccgcagccctcgcacctccatcctggacgctgcgggcagcgggagtggcagtggaagcggcagcggcccctagcggacgcgtggccctgagttgggggagcgacccttcccccagccccgcccctcaggacacccagaaccccacccctcgtcctctcggccttctgtaatagttttgagatgtctgtccctcctccctggagctccagagacccacccctctccaggttatcccagaaatgacccaactctctcacttttccctctcccctttgaataaagtcgccagctagagccaaaaaaaaaaaaaaaaaaaagaaaaaaa

SEQ ID NO: 150 - protein, 229 aa, Homo sapiens
MDCRVHMRPIGLTWVLQLTLAWILLEACGGSRPLQARSQQHHGLAADLGKGKLHLAGPCCPSEMDTTETSGPGNHPERCGVPSPECESFLEHLQRALRSRFRLRLLGVRQAQPLCEELCQAWFANCEDDITCGPTWLPLSEKRGCEPSCLTYGQTFADGTDLCRSALGHALPVAAPGARHCFNISISAVPRPRPGRRGREAPSRRSRSPRTSILDAAGSGSGSGSGSGP

SEQ ID NO: 151 - DNA, 1463 bp, Homo sapiens
gccgctgcccctgctgtgggcagggccctcgctcaggatgcaagattccggctggagatgccagagtccgtgacggtgcaggagggtctgtgcatctttgtgcactgttcggtcttctacctcgagtatggctggaaagattctacccctgcttatggccactggttccgggaaggggtcagtgtagaccaggagactccagtggccacaaacaactcaactcaaaaagtgcagaaggagacccagggccgattccacctcctcggtgatccctcaaggaacaactgctccctgagcatcagagacgccaggaggagggacaacggttcatacttcttttgggtggcgagaggaagaacaaaatttagttacaaatattccccgctctctgtgtatgtgacagccctgacccacaggcccgacatcctcatcccggagttcctaaagtctggccatcccagcaacctgacctgctctgtgccctgggtctgtgagcagggaacaccccccatcttctcctggatgtcagctgcccccacctccctgggccccaggaccctccactcctcagtgctcacgatcatcccacggcctcaggaccacggcaccaacctcatctgtcaggtgacgttccccggagctggtgtgaccacggagagaaccatccagctcagtgtctcctatcctctaatgaacccagtgattgaagcctccctagaagacggcacagggaaatcaggaaccgtggaagaggtggttgttttggccgtgggggtagtggctgtgaagatcctgcttctctgcctttgcctcatcatcctcagtttccacaagaagaaggcggtgagggcagtggaggttgaggagaatgtatatgctgtcatgggttaatctctcaggcctccagactgtacttccagatgtctcctcatccagttcctccacagtctgaatggccatgtttcttcttcattgctggagaatgaagtgcaaatgccactgcctggactgaaggcctttcacgatctgtcttctgctggactctgctcctgatcccccttctccttgcatcacccgaagtctccctacacccaccaggccaagccctctgtgattctgagactttgcatgtgtagttacttctcctgaaatggccttcctccccattcctgccaatccaggtccttatcatccttcaggttgtcttaaatgtcatccaggtgtgtgtatttttatgtaatccttgtatgatattaagcggagatgtggcatttgttcattaatttgtagacatattcagtaaccatactgaatacatataatgactatgtgccagcatttccgtatgtgcaagaagttcatcaatagatatagactcaaagagctctgtcatcaagctgttgttctgaagagcagaaggatacaaataaaaagaaataagtaaaataaaaaaaaaaaaaaaa

SEQ ID NO: 152 - protein, 296 aa, Homo sapiens
AAAPAVGRALAQDARFRLEMPESVTVQEGLCIFVHCSVFYLEYGWKDSTPAYGHWFREGVSVDQETPVATNNSTQKVQKETQGRFHLLGDPSRNNCSLSIRDARRRDNGSYFFWVARGRTKFSYKYSPLSVYVTALTHRPDILIPEFLKSGHPSNLTCSVPWVCEQGTPPIFSWMSAAPTSLGPRTLHSSVLTIIPRPQDHGTNLICQVTFPGAGVTTERTIQLSVSYPLMNPVIEASLEDGTGKSGTVEEVVVLAVGVVAVKILLLCLCLIILSFHKKKAVRAVEVEENVYAVMG

SEQ ID NO: 153 - DNA, 1463 bp, Homo sapiens; identical to SEQ ID NO: 151

SEQ ID NO: 154 - protein, 277 aa, Homo sapiens
MPESVTVQEGLCIFVHCSVFYLEYGWKDSTPAYGHWFREGVSVDQETPVATNNSTQKVQKETQGRFHLLGDPSRNNCSLSIRDARRRDNGSYFFWVARGRTKFSYKYSPLSVYVTALTHRPDILIPEFLKSGHPSNLTCSVPWVCEQGTPPIFSWMSAAPTSLGPRTLHSSVLTIIPRPQDHGTNLICQVTFPGAGVTTERTIQLSVSYPLMNPVIEASLEDGTGKSGTVEEVVVLAVGVVAVKILLLCLCLIILSFHKKKAVRAVEVEENVYAVMG

SEQ ID NO: 155 - DNA, 3042 bp, Homo sapiens
ggagacagcctcctggggggcaggggttccctgcctctgctgctcctgctcatcatggccccctgcccggggacatgcccacgatggccaggccctgtccacagacctgggtgtctacacatgtgaggccagcaaccggcttggcacggcagtcagcagaggcgctcggctgtctgtggctgtcctccgggaggatttccagatccagcctcgggacatggtggctgtggtgggtgagcagtttactctggaatgtgggccgccctggggccacccagagcccacagtctcatggtggaaagatgggaaacccctggccctccagcccggaaggcacacagtgtccggggggtccctgctgatggcaagagcagagaagagtgacgaagggacctacatgtgtgtggccaccaacagcgcaggacatagggagagccgcgcagcccgggtttccatccaggagccccaggactacacggagcctgtggagcttctggctgtgcgaattcagctggaaaatgtgacactgctgaacccggatcctgcagagggccccaagcctagaccggcggtgtggctcagctggaaggtcagtggccctgctgcgcctgcccaatcttacacggccttgttcaggacccagactgccccgggaggccagggagctccgtgggcagaggagctgctggccggctggcagagcgcagagcttggaggcctccactggggccaagactacgagttcaaagtgagaccatcctctggccgggctcgaggccctgacagcaacgtgctgctcctgaggctgccggaaaaagtgcccagtgccccacctcaggaagtgactctaaagcctggcaatggcactgtctttgtgagctgggtcccaccacctgctgaaaaccacaatggcatcatccgtggctaccaggtctggagcctgggcaacacatcactgccaccagccaactggactgtagttggtgagcagacccagctggaaatcgccacccatatgccaggctcctactgcgtgcaagtggctgcagtcactggtgctggagctggggagcccagtagacctgtctgcctccttttagagcaggccatggagcgagccacccaagaacccagtgagcatggtccctggaccctggagcagctgagggctaccttgaagcggcctgaggtcattgccacctgcggtgttgcactctggctgctgcttctgggcaccgccgtgtgtatccaccgccggcgccgagctagggtgcacctgggcccaggtctgtacagatataccagtgaggatgccatcctaaaacacaggatggatcacagtgactcccagtggttggcagacacttggcgttccacctctggctctcgggacctgagcagcagcagcagcctcagcagtcggctgggggcggatgcccgggacccactagactgtcgtcgctccttgctctcctgggactcccgaagccccggcgtgcccctgcttccagacaccagcactttttatggctccctcatcgctgagctgccctccagtaccccagccaggccaagtccccaggtcccagctgtcaggcgcctcccaccccagctggcccagctctccagcccctgttccagctcagacagcctctgcagccgcaggggactctcttctccccgcttgtctctggcccctgcagaggcttggaaggccaaaaagaagcaggagctgcagcatgccaacagttccccactgctccggggcagccactccttggagctccgggcctgtgagttaggaaatagaggttccaagaacctttcccaaagcccaggagctgtgccccaagctctggttgcctggcgggccctgggaccgaaactcctcagctcctcaaatgagctggttactcgtcatctccctccagcacccctctttcctcatgaaactcccccaactcagagtcaacagacccagcctccggtggcaccacaggctccctcctccatcctgctgccagcagcccccatccccatccttagcccctgcagtccccctagcccccaggcctcttccctctctggccccagcccagcttccagtcgcctgtccagctcctcactgtcatccctgggggaggatcaagacagcgtgctgacccctgaggaggtagccctgtgcttggaactcagtgagggtgaggagactcccaggaacagcgtctctcccatgccaagggctccttcaccccccaccacctatgggtacatcagcgtcccaacagcctcagagttcacggacatgggcaggactggaggaggggtggggcccaaggggggagtcttgctgtgcccacctcggccctgcctcacccccacccccagcgagggctccttagccaatggttggggctcagcctctgaggacaatgccgccagcgccagagccagccttgtcagctcctccgatggctccttcctcgctgatgctcactttgcccgggccctggcagtggctgtggatagctttggtttcggtctagagcccagggaggcagactgcgtcttcatagatgcctcatcacctccctccccacgggatgagatcttcctgacccccaacctctccctgcccctgtgggagtggaggccagactggttggaagacatggaggtcagccacacccagcggctgggaagggggatgcctccctggccccctgactctcagatctcttcccagagaagtcagctccactgtcgtatgcccaaggctggtgcttctcctgtagattactcctgaaccgtgtccctgagacttcccagacgggaatcagaaccacttctcctgtccacccacaagacctgggctgtggtgtgtgggtcttggcctgtgtttctctgcagctggggtccaccttcccaagcctccagagagttctccctccacgattgtgaaaacaaatgaaaacaaaattagagcaaagctgacctggaaaaaaaaaaaaaaaaaaaaaaaaaaaaaggaaaaaaaaaaaa

SEQ ID NO: 156 - protein, 934 aa, Homo sapiens
ETASWGAGVPCLCCSCSSWPPARGHAHDGQALSTDLGVYTCEASNRLGTAVSRGARLSVAVLREDFQIQPRDMVAVVGEQFTLECGPPWGHPEPTVSWWKDGKPLALQPGRHTVSGGSLLMARAEKSDEGTYMCVATNSAGHRESRAARVSIQEPQDYTEPVELLAVRIQLENVTLLNPDPAEGPKPRPAVWLSWKVSGPAAPAQSYTALFRTQTAPGGQGAPWAEELLAGWQSAELGGLHWGQDYEFKVRPSSGRARGPDSNVLLLRLPEKVPSAPPQEVTLKPGNGTVFVSWVPPPAENHNGIIRGYQVWSLGNTSLPPANWTVVGEQTQLEIATHMPGSYCVQVAAVTGAGAGEPSRPVCLLLEQAMERATQEPSEHGPWTLEQLRATLKRPEVIATCGVALWLLLLGTAVCIHRRRRARVHLGPGLYRYTSEDAILKHRMDHSDSQWLADTWRSTSGSRDLSSSSSLSSRLGADARDPLDCRRSLLSWDSRSPGVPLLPDTSTFYGSLIAELPSSTPARPSPQVPAVRRLPPQLAQLSSPCSSSDSLCSRRGLSSPRLSLAPAEAWKAKKKQELQHANSSPLLRGSHSLELRACELGNRGSKNLSQSPGAVPQALVAWRALGPKLLSSSNELVTRHLPPAPLFPHETPPTQSQQTQPPVAPQAPSSILLPAAPIPILSPCSPPSPQASSLSGPSPASSRLSSSSLSSLGEDQDSVLTPEEVALCLELSEGEETPRNSVSPMPRAPSPPTTYGYISVPTASEFTDMGRTGGGVGPKGGVLLCPPRPCLTPTPSEGSLANGWGSASEDNAASARASLVSSSDGSFLADAHFARALAVAVDSFGFGLEPREADCVFIDASSPPSPRDEIFLTPNLSLPLWEWRPDWLEDMEVSHTQRLGRGMPPWPPDSQISSQRSQLHCRMPKAGASPVDYS

SEQ ID NO: 157 - DNA, 3808 bp, Homo sapiens
ggcactggatgccagtggttttatgctttatgtgtttcatcattactttatccctcaaggtaggaactactattattatttccattttacagagaaggaaactgacttgcccaagttctccacagaagcttatttcatccatctctgagctgaatatggacacaccctgtggaggcatggctcaggactccccgccccagatcctagtccacccccaggaccagctgttccagggccctggccctgccaggatgagctgccaagcctcaggccagccacctcccaccatccgctggttgctgaatgggcagcccctgagcatggtgcccccagacccacaccacctcctgcctgatgggacccttctgctgctacagccccctgcccggggacatgcccacgatggccaggccctgtccacagacctgggtgtctacacatgtgaggccagcaaccggcttggcacggcagtcagcagaggcgctcggctgtctgtggctgtcctccgggaggatttccagatccagcctcgggacatggtggctgtggtgggtgagcagtttactctggaatgtgggccgccctggggccacccagagcccacagtctcatggtggaaagatgggaaacccctggccctccagcccggaaggcacacagtgtccggggggtccctgctgatggcaagagcagagaagagtgacgaagggacctacatgtgtgtggccaccaacagcgcaggacatagggagagccgcgcagcccgggtttccatccaggagccccaggactacacggagcctgtggagcttctggctgtgcgaattcagctggaaaatgtgacactgctgaacccggatcctgcagagggccccaagcctagaccggcggtgtggctcagctggaaggtcagtggccctgctgcgcctgcccaatcttacacggccttgttcaggacccagactgccccgggaggccagggagctccgtgggcagaggagctgctggccggctggcagagcgcagagcttggaggcctccactggggccaagactacgagttcaaagtgagaccatcctctggccgggctcgaggccctgacagcaacgtgctgctcctgaggctgccggaaaaagtgcccagtgccccacctcaggaagtgactctaaagcctggcaatggcactgtctttgtgagctgggtcccaccacctgctgaaaaccacaatggcatcatccgtggctaccaggtctggagcctgggcaacacatcactgccaccagccaactggactgtagttggtgagcagacccagctggaaatcgccacccatatgccaggctcctactgcgtgcaagtggctgcagtcactggtgctggagctggggagcccagtagacctgtctgcctccttttaggccatggagcgagccacccaagaacccagtgagcatggtccctggaccctggagcagctgagggctaccttgaagcggcctgaggtcattgccacctgcggtgttgcactctggctgctgcttctgggcaccgccgtgtgtatccaccgccggcgccgagctagggtgcacctgggcccaggtctgtacagatataccagtgaggatgccatcctaaaacacaggatggatcacagtgactcccagtggttggcagacacttggcgttccacctctggctctcgggacctgagcagcagcagcagcctcagcagtcggctgggggcggatgcccgggacccactagactgtcgtcgctccttgctctcctgggactcccgaagccccggcgtgcccctgcttccagacaccagcactttttatggctccctcatcgctgagctgccctccagtaccccagccaggccaagtccccaggtcccagctgtcaggcgcctcccaccccagctggcccagctctccagcccctgttccagctcagacagcctctgcagccgcaggggactctcttctccccgcttgtctctggcccctgcagaggcttggaaggccaaaaagaagcaggagctgcagcatgccaacagttccccactgctccggggcagccactccttggagctccgggcctgtgagttaggaaatagaggttccaagaacctttcccaaagcccaggagctgtgccccaagctctggttgcctggcgggccctgggaccgaaactcctcagctcctcaaatgagctggttactcgtcatctccctccagcacccctctttcctcatgaaactcccccaactcagagtcaacagacccagcctccggtggcaccacaggctccctcctccatcctgctgccagcagcccccatccccatccttagcccctgcagtccccctagcccccaggcctcttccctctctggccccagcccagcttccagtcgcctgtccagctcctcactgtcatccctgggggaggatcaagacagcgtgctgacccctgaggaggtagccctgtgcttggaactcagtgagggtgaggagactcccaggaacagcgtctctcccatgccaagggctccttcaccccccaccacctatgggtacatcagcgtcccaacagcctcagagttcacggacatgggcaggactggaggaggggtggggcccaaggggggagtcttgctgtgcccacctcggccctgcctcacccccacccccagcgagggctccttagccaatggttggggctcagcctctgaggacaatgccgccagcgccagagccagccttgtcagctcctccgatggctccttcctcgctgatgctcactttgcccgggccctggcagtggctgtggatagctttggtttcggtctagagcccagggaggcagactgcgtcttcatagatgcctcatcacctccctccccacgggatgagatcttcctgacccccaacctctccctgcccctgtgggagtggaggccagactggttggaagacatggaggtcagccacacccagcggctgggaagggggatgcctccctggccccctgactctcagatctcttcccagagaagtcagctccactgtcgtatgcccaaggctggtgcttctcctgtagattactcctgaaccgtgtccctgagacttcccagacgggaatcagaaccacttctcctgtccacccacaagacctgggctgtggtgtgtgggtcttggcctgtgtttctctgcagctggggtccaccttcccaagcctccagagagttctccctccacgattgtgaaaacaaatgaaaacaaaatttgagcaaagctgacctggagccctcagggagcaaaacatcatctccacctgactcctagccactgctttctcctctgtgccatccactcccaccaccaggttgttttggcctgaggagcagccctgcctgctgctcttcccccaccatttggatcacaggaagtggaggagccagaggtgcctttgtggaggacagcagtggctgctgggagagggctgtggaggaaggagcttctcggagccccctctcagccttacctgggcccctcctctagagaagagctcaactctctcccaacctcaccatggaaagaaaataattatgaatgccactgaggcactgaggccctacctcatgccaaacaaagggttcaaggctgggtctagcgaggatgctgaaggaagggaggtatgagaccgtaggtcaaaagcaccatcctcgtactgttgtcactatgagcttaagaaatttgataccataaaatggtaaagacttgaaaaaaaaaaaaaaaa

SEQ ID NO: 158 - protein, 480 aa, Homo sapiens
MPVVLCFMCFIITLSLKVGTTIIISILQRRKLTCPSSPQKLISSISELNMDTPCGGMAQDSPPQILVHPQDQLFQGPGPARMSCQASGQPPPTIRWLLNGQPLSMVPPDPHHLLPDGTLLLLQPPARGHAHDGQALSTDLGVYTCEASNRLGTAVSRGARLSVAVLREDFQIQPRDMVAVVGEQFTLECGPPWGHPEPTVSWWKDGKPLALQPGRHTVSGGSLLMARAEKSDEGTYMCVATNSAGHRESRAARVSIQEPQDYTEPVELLAVRIQLENVTLLNPDPAEGPKPRPAVWLSWKVSGPAAPAQSYTALFRTQTAPGGQGAPWAEELLAGWQSAELGGLHWGQDYEFKVRPSSGRARGPDSNVLLLRLPEKVPSAPPQEVTLKPGNGTVFVSWVPPPAENHNGIIRGYQVWSLGNTSLPPANWTVVGEQTQLEIATHMPGSYCVQVAAVTGAGAGEPSRPVCLLLGHGASHPRTQ

SEQ ID NO: 159 - DNA, 4336 bp, Homo sapiens
gcttgagcttctgagggtcgggtccagcgcgtgggctgctggatggcggaaccccaggcggagtcggagcccctgctgggcggggcccgcggcggtggcggcgactggccggcggggctgaccacttaccgcagcatccaagtcggccctggtgccgcggccaggtgggacctctgcattgatcaggctgtggtcttcatcgaagatgctattcagtaccgctccatcaaccaccgggtggatgccagctcgatgtggctttaccgacggtattactcgaacgtatgccaacggactttgagcttcaccatcttcttgatcctgtttttggcttttatcgagaccccatcctcactcaccagcacggcggacgtgcgctaccgcgctgccccctgggagccgccctgcggcctgaccgagagtgtcgaggtgctctgcctgctggtctttgcggccgacctctctgtgaagggttacctgttcgggtgggcccatttccagaaaaacctttggctgctgggctacctcgtggtgctggtggtgtctctggtggactggaccgtgtccctgagtctcgtgtgtcatgagcccctgcggatccgccggcttctccgtcccttcttcctgctgcagaactcctctatgatgaagaagaccttgaaatgcatccgctggtcgctgccggaaatggccagcgtcgggctgctgctggccatccacctgtgcctcttcaccatgttcggaatgctgctgttcgctggtgggaagcaggatgatgggcaggacagggagaggctgacctacttccagaacctgcctgagtctctgacttccctcctggtgctgctgaccacggccaacaaccccgatgtgatgattcctgcgtattccaagaaccgggcctatgccatcttcttcatagtcttcactgtgataggaagcctgtttctgatgaacctgctgacagccatcatctacagtcagttccggggctacctgatgaaatctctccagacctcgctgtttcggaggcggctgggaacccgggctgcctttgaagtcctatcctccatggtgggggagggaggagccttccctcaggcagttggggtgaagccccagaacttgctgcaggtgcttcagaaggtccagctggacagctcccacagacaggccatgatggagaaggtgcgttcctatggcagtgttctgctctcagctgaggagtttcagaagctcttcaacgagcttgacagaagtgtggttaaagagcacccgccgaggcccgagtaccagtctccgtttctgcagagcgcccagttcctcttcggccactactactttgactacctggggaacctcatcgccctggcaaacctggtgtccatttgcgtgttcctggtgctggatgcagatgtgctgcctgctgagcgtgatgacttcatcctggggattctcaactgcgtcttcattgtgtactacctgttggagatgctgctcaaggtctttgccctgggcctgcgagggtacctgtcctaccccagcaacgtgtttgacgggctcctcaccgttgtcctgctggttttggagatctcaactctggctgtgtaccgattgccacacccaggctggaggccggagatggtgggcctgctgtcgctgtgggacatgacccgcatgctgaacatgctcatcgtgttccgcttcctgcgtatcatccccagcatgaagccgatggccgtggtggccagtaccgtcctgggcctggtgcagaacatgcgtgcgtttggcgggatcctggtgggaccactggggtgagaaggtgtctctggggctgcagggtgctctgggctggaccccagctgtgcctcgcgcctctggaaatagacgctgggaagagaatcttgcctcaggtgctgtctgcccagccccctaacttgcacagcagaggaaactgaggcccagaaaggggaccaggtggtctactacgtatttgccatcattgggatcaacttgtttagaggcgtcattgtggctcttcctggaaacagcagcctggcccctgccaatggctcggcgccctgtgggagcttcgagcagctggagtactgggccaacaacttcgatgactttgcggctgccctggtcactctgtggaacttgatggtggtgaacaactggcaggtgtttctggatgcatatcggcgctactcaggcccgtggtccaagatctattttgtattgtggtggctggtgtcgtctgtcatctgggtcaacctgtttctggccctgattctggagaacttccttcacaagtgggacccccgcagccacttgcagccccttgctgggaccccagaggccacctaccagatgactgtggagctcctgttcagggatattctggaggagcccggggaggatgagctcacagagaggctgagccagcacccgcacctgtggctgtgcaggtgacgtccgggctgccgtcccagcaggggcggcaggagagagaggctggcctacacaggtgcccatcatggaagaggcggccatgctgtggccagccaggcaggaagagacctttcctctgacggaccactaagctggggacaggaaccaagtcctttgcgtgtggcccaacaaccatctacagaacagctgctggtgcttcagggaggcgccgtgccctccgctttcttttatagctgcttcagtgagaattccctcgtcgactccacagggacctttcagacaaaaatgcaagaagcagcggcctcccctgtcccctgcagcttccgtggtgcctttgctgccggcagcccttggggaccacaggcctgaccagggcctgcacaggttaaccgtcagacttccggggcattcagtctctgctttctcagaaggttactccaaaaggggaccacaaggtcaagatgggcatggggaggctttggatgccgaagcagttttattttggcaagtcagccgaaggagcacgtgcgcctaaaattaggcaagagtgtgagctgcacacaagttcacacgctcaaaactcctgtgggcagggcctgcgcagctctcctctgtctgttaatggtacagtctgttcagacctttggaacattcctcagcttttatttaatgtaggaagaatcatttctggaattagcatataaattggcagaagtcagcagctctagcagaagtcactctctgtgtcaggacaggagagcgaaggcctgtgcatggatgggaggtccactcccactcccctggcgccctcctttccccttcaaggggcatttacatggttcatttaaaacactccagccttcttcccaaaatgtgcaacttgggaaagaatctgtgtcccttcagctctggctgcaaggggagaggggtcgtggccagggacggggtgctgaggagagcatgggaagcctttctgaccaaatggcttgcttcgggaaaattttcccacaggagtggccccatggcctgcctcccagcacaaggttattgaaagggaacacagagaaatgttcactgccctaagctgtcttgtctggtctggtcgggggcagatattttacacattttatagccctattagttttaggtcttttggataggggtgaccagttgatcattaactgtttgctacgtgtggcattccgaattctggccccagatagctcagcccagcgtgctgattccgcctggccattgggccatggctgggtgggccgccgccttccccagcgggtggggcgaattctcctgatgccagggctggggcccatgtggaggcctccctggctccctcaggctctggtgtgaacacttcattatcctttctgggagttcaatccccttgtgaacccttcaccatggtgtcttcacaagactgtgggcgtctgccctaaaaaggcaccaatgatttgattctgacattcctactttggtgtgtttcccccagaataaaatagcaatcaggctgagcgcggtggctcatgcctgtaatcccagcactttggaaggctgagttgggcggatcacgaggtccggagatcgagaccatcctggctaatatggtgaaaccctatctctactaaaaatacaaaaaattagccaggtgttatgggcgcctatagtcccagctactcaggaggctgaggcagaagaatcgcttgaactcgggaggcggaggttgcagtgagccgagatcgcggcactgcactccagcctgggcaacagagcgagactcctccccacccccccagcaaaaacagcaataaaacaggggctctctctaaaaaaaaaaaaaaaaaaa

SEQ ID NO: 160 - protein, 591 aa, Homo sapiens
MAEPQAESEPLLGGARGGGGDWPAGLTTYRSIQVGPGAAARWDLCIDQAVVFIEDAIQYRSINHRVDASSMWLYRRYYSNVCQRTLSFTIFLILFLAFIETPSSLTSTADVRYRAAPWEPPCGLTESVEVLCLLVFAADLSVKGYLFGWAHFQKNLWLLGYLVVLVVSLVDWTVSLSLVCHEPLRIRRLLRPFFLLQNSSMMKKTLKCIRWSLPEMASVGLLLAIHLCLFTMFGMLLFAGGKQDDGQDRERLTYFQNLPESLTSLLVLLTTANNPDVMIPAYSKNRAYAIFFIVFTVIGSLFLMNLLTAIIYSQFRGYLMKSLQTSLFRRRLGTRAAFEVLSSMVGEGGAFPQAVGVKPQNLLQVLQKVQLDSSHRQAMMEKVRSYGSVLLSAEEFQKLFNELDRSVVKEHPPRPEYQSPFLQSAQFLFGHYYFDYLGNLIALANLVSICVFLVLDADVLPAERDDFILGILNCVFIVYYLLEMLLKVFALGLRGYLSYPSNVFDGLLTVVLLVLEISTLAVYRLPHPGWRPEMVGLLSLWDMTRMLNMLIVFRFLRIIPSMKPMAVVASTVLGLVQNMRAFGGILVGPLG

SEQ ID NO: 161 - DNA, 1912 bp, Homo sapiens
gactggcatgtatctggatcaattcagaagaacactcattacatgatgatctttgatgcctttgtcattctgacttgcttggtttcattaatcctctgcattagatctgtgattagaggacttcagcttcagcaggagtttgtcaattttttcctcctccattataagaaggaagtttctgtttctgatcaaatggaatttgtcaatggatggtacattatgattattattagtgacatattgacaatcattggatcaattctaaaaatggaaatccaagctaagagtctaactagttatgatgtctgtagcatacttcttgggacttctaccatgcttgtgtggcttggagtcatccgatacctcggtttctttgcaaagtacaacctcctcattttgacccttcaggcagcgctgcccaatgtcatcaggttctgctgctgtgcagctatgatttacttaggttactgcttctgtggatggatcgtgctggggccttaccatgacaagtttcgttctctgaacatggtctctgagtgccttttctctctgataaatggagatgatatgtttgccacgtttgcaaaaatgcagcaaaaaaagttacttagtctggctgtttagtagaatttacctctactcattcatcagcctctttatatatatgattttaagtcttttcattgcactgatcactgatacatacgaaacaattaagcaataccaacaagatggcttcccagagactgaacttcgtacatttatatcagaatgcaaagatctacccaactctggaaaatacagattagaagatgaccctccagtatctttattctgctgttgtaaaaagtagctatcaggtttatctgtactttagaggaaaatataatgtgtagctgagttggaacactgtggatattctgagatcagatgtagtatgtttgaagactgttattttgagctaattgagacctataattcaccaataactgtttatatttttaaaagcaatatttaatgtctttgcaactttatgctgggattgtttttaaaaaaactttaatgaggaaagctattggattattattatttcttgtttattttgccatggctttagaatgtattctgtatgcctctcttttgctctgatactgttgctcctgctattctgattgtgcagactgtataattagtggaaaacaatccttggtctgactgtgactttggacaactcagtaaccctggcttggaccactctcaggagtccatccttgagagagtgggtgtagttaccatttatacagtaatcattgcattttaaaatcttctcttgaaaggaagaataagagtgcaccagaataagagcgcaccagaataagagcacaccagctaacaatgtgatacggccatatgtcacttaaggatggagatatgttctgagaaatgtgtcattaggcgattttgtcattaaacatcatagcatgtacttccacaaacctagatggtatagcctactacacacctaggctatttggtatagcctgttggtcctggggtacaaatctgtacaacatgttactgtattgaatacagtaggcaattgtaacacaatggtaagtatctaaacatagaaaagggacagtaaaaatatggttttataatcttctgggaccaccattgtatatgcggtacatcattgaccaaaacatcgttatccagcatatgactgtatttggttatgaaagccaactgttacttgattctgcttttagttcttaagaggatcaggcttttaaatactcatttacaagttttctatcctccttcagtgttaaagtagaaagtaaaaagagtatcttatacatgcatgaaattaaagcatataccaaatgcaaaaaaaaaaaaaaaaaaa

SEQ ID NO: 162 - protein, 193 aa, Homo sapiens
MMIFDAFVILTCLVSLILCIRSVIRGLQLQQEFVNFFLLHYKKEVSVSDQMEFVNGWYIMIIISDILTIIGSILKMEIQAKSLTSYDVCSILLGTSTMLVWLGVIRYLGFFAKYNLLILTLQAALPNVIRFCCCAAMIYLGYCFCGWIVLGPYHDKFRSLNMVSECLFSLINGDDMFATFAKMQQKKLLSLAV

What is claimed is:

1. An isolated nucleic acid molecule selected from the group consisting of:
a) a nucleic acid molecule having a nucleotide sequence which is at least 90% identical to the nucleotide sequence of any of SEQ ID NOs: 1, 3, 5, 7, 9, 11, 13, 15, 17, 19, 21, 23, 25, 27, 29, 31, 33, 35, 37, 39, 41, 43, 45, 47, 49, 51, 53, 55, 57, 59, 61, 63, 65, 67, 69, 71, 73, 75, 77, 79, 81, 83, 85, 87, 89, 91, 93, 95, 97, 99, 101, 103, 105, 107, 109, 111, 113, 115, 117, 119, 121, 123, 125, 127, 129, 131, 133, 135, 137, 139, 141, 143, 145, 147, 149, 151, 153, 155, 157, 159, 161, and 163, and the nucleotide sequence of any of the clones deposited as ATCC® Accession numbers 98880, 98999, 202171, 98965, 98966, 98899, 207042, 207044, 207043, 207081, 207176, 207222, 207215, 207217, 207221, 207192, 207189, 207223, 207221, 207220, PTA-250, 207178, PTA-250, PTA-249, PTA-292, PTA-291, PTA-295, PTA-455, PTA-438, PTA-454, PTA-425, and PTA-816, or a complement thereof,
b) a nucleic acid molecule comprising at least 15 nucleotide residues and having a nucleotide sequence identical to at least 15 consecutive nucleotide residues of any of SEQ ID NOs: 1, 3, 5, 7, 9, 11, 13, 15, 17, 19, 21, 23, 25, 27, 29, 31, 33, 35, 37, 39, 41, 43, 45, 47, 49, 51, 53, 55, 57, 59, 61, 63, 65, 67, 69, 71, 73, 75, 77, 79, 81, 83, 85, 87, 89, 91, 93, 95, 97, 99, 101, 103, 105, 107, 109, 111, 113, 115, 117, 119, 121, 123, 125, 127, 129, 131, 133, 135, 137, 139, 141, 143, 145, 147, 149, 151, 153, 155, 157, 159, 161, and 163, and the nucleotide sequence of any of the clones deposited as ATCC® Accession numbers 98880, 98999, 202171, 98965, 98966, 98899, 207042, 207044, 207043, 207081, 207176, 207222, 207215, 207217, 207221, 207192, 207189, 207223, 207221, 207220, PTA-250, 207178, PTA-250, PTA-249, PTA-292, PTA-291, PTA-295, PTA-455, PTA-438, PTA-454, PTA-425, and PTA-816, or a complement thereof;
c) a nucleic acid molecule which encodes a polypeptide comprising the amino acid sequence of any of SEQ ID NOs: 2, 4, 6, 8, 10, 12, 14, 16, 18, 20, 22, 24, 26, 28, 30, 32, 34, 36, 38, 40, 42, 44, 46, 48, 50, 52, 54, 56, 58, 60, 62, 64, 66, 68, 70, 72, 74, 76, 78, 80, 82, 84, 86, 88, 90, 92, 94, 96, 98, 100, 102, 104, 106, 108, 110, 112, 114, 116, 118, 120, 122, 124, 126, 128, 130, 132, 134, 136, 138, 140, 142, 144, 146, 148, 150, 152, 154, 156, 158, 160, 162, and 164, and the amino acid sequence encoded by the nucleotide sequence of any of the clones deposited as ATCC® Accession numbers 98880, 98999, 202171, 98965, 98966, 98899, 207042, 207044, 207043, 207081, 207176, 207222, 207215, 207217, 207221, 207192, 207189, 207223, 207221, 207220, PTA-250, 207178, PTA-250, PTA-249, PTA-292, PTA-291, PTA-295, PTA-455, PTA-438, PTA-454, PTA-425, and PTA-816;
d) a nucleic acid molecule which encodes a fragment of a polypeptide comprising the amino acid sequence of any of SEQ ID NOs: 2, 4, 6, 8, 10, 12, 14, 16, 18, 20, 22, 24, 26, 28, 30, 32, 34, 36, 38, 40, 42, 44, 46, 48, 50, 52, 54, 56, 58, 60, 62, 64, 66, 68, 70, 72, 74, 76, 78, 80, 82, 84, 86, 88, 90, 92, 94, 96, 98, 100, 102, 104, 106, 108, 110, 112, 114, 116, 118, 120, 122, 124, 126, 128, 130, 132, 134,136, 138, 140, 142, 144, 146, 148, 150, 152, 154, 156, 158, 160, 162, and 164, and the amino acid sequence encoded by the nucleotide sequence of any of the clones deposited as ATCC® Accession numbers 98880, 98999, 202171, 98965, 98966, 98899, 207042, 207044, 207043, 207081, 207176, 207222, 207215, 207217, 207221, 207192, 207189, 207223, 207221, 207220, PTA-250, 207178, PTA-250, PTA-249, PTA-292, PTA-291, PTA-295, PTA-455, PTA-438, PTA-454, PTA-425, and PTA-816, wherein the fragment comprises at least 10 consecutive amino acid residues of any of SEQ ID NOs: 2, 4, 6, 8, 10, 12, 14, 16, 18, 20, 22, 24, 26, 28, 30, 32, 34, 36, 38, 40, 42, 44, 46, 48, 50, 52, 54, 56, 58, 60, 62, 64, 66, 68, 70, 72, 74, 76, 78, 80, 82, 84, 86, 88, 90, 92, 94, 96, 98, 100, 102, 104, 106, 108, 110, 112, 114, 116, 118, 120, 122, 124, 126, 128, 130, 132, 134, 136, 138, 140, 142, 144, 146, 148, 150, 152, 154, 156, 158, 160, 162, and 164, and the amino acid sequence encoded by the nucleotide sequence of any of the clones deposited as ATCC® Accession numbers 98880, 98999, 202171, 98965, 98966, 98899, 207042, 207044, 207043, 207081, 207176, 207222, 207215, 207217, 207221, 207192, 207189, 207223, 207221, 207220, PTA-250, 207178, PTA-250, PTA-249, PTA-292, PTA-291, PTA-295, PTA-455, PTA-438, PTA-454, PTA-425, and PTA-816;and
e) a nucleic acid molecule which encodes a fragment of a polypeptide comprising the amino acid sequence of any of SEQ ID NOs: 2, 4, 6, 8, 10, 12, 14, 16, 18, 20, 22, 24, 26, 28, 30, 32, 34, 36, 38, 40, 42, 44, 46, 48, 50, 52, 54, 56, 58, 60, 62, 64, 66, 68, 70, 72, 74, 76, 78, 80, 82, 84, 86, 88, 90, 92, 94, 96, 98, 100, 102, 104, 106, 108, 110, 112, 114, 116, 118, 120, 122, 124, 126, 128, 130, 132, 134, 136, 138, 140, 142, 144, 146, 148, 150, 152, 154, 156, 158, 160, 162, and 164, and the amino acid sequence encoded by the nucleotide sequence of any of the clones deposited as ATCC® Accession numbers 98880, 98999, 202171, 98965, 98966, 98899, 207042, 207044, 207043, 207081, 207176, 207222, 207215, 207217, 207221, 207192, 207189, 207223, 207221, 207220, PTA-250, 207178, PTA-250, PTA-249, PTA-292, PTA-291, PTA-295, PTA-455, PTA-438, PTA-454, PTA-425, and PTA-816, wherein the fragment comprises consecutive amino acid residues corresponding to at least half of the full length of any of SEQ ID NOs: 2, 4, 6, 8, 10, 12, 14, 16, 18, 20, 22, 24, 26, 28, 30, 32, 34, 36, 38, 40, 42, 44, 46, 48, 50, 52, 54, 56, 58, 60, 62, 64, 66, 68, 70, 72, 74, 76, 78, 80, 82, 84, 86, 88, 90, 92, 94, 96, 98, 100, 102, 104, 106, 108, 110, 112, 114, 116, 118, 120, 122, 124, 126, 128, 130, 132, 134, 136, 138, 140, 142, 144, 146, 148, 150, 152, 154, 156, 158, 160, 162, and 164, and the amino acid sequence encoded by the nucleotide sequence of any of the clones deposited as ATCC® Accession numbers 98880, 98999, 202171, 98965, 98966, 98899, 207042, 207044, 207043, 207081, 207176, 207222, 207215, 207217, 207221, 207192, 207189, 207223, 207221, 207220, PTA-250, 207178, PTA-250, PTA-249, PTA-292, PTA-291, PTA-295, PTA-455, PTA-438, PTA-454, PTA-425, and PTA-816; and
f) a nucleic acid molecule which encodes a naturally occurring allelic variant of a polypeptide comprising the amino acid sequence of any of SEQ ID NOs: 2, 4, 6, 8, 10, 12, 14, 16, 18, 20, 22, 24, 26, 28, 30, 32, 34, 36, 38, 40, 42, 44, 46, 48, 50, 52, 54, 56, 58, 60, 62, 64, 66, 68, 70, 72, 74, 76, 78, 80, 82, 84, 86, 88, 90, 92, 94, 96, 98, 100, 102, 104, 106, 108, 110, 112, 114, 116, 118, 120, 122, 124, 126, 128, 130, 132, 134, 136, 138, 140, 142, 144, 146, 148, 150, 152, 154, 156, 158, 160, 162, and 164, wherein the nucleic acid molecule hybridizes with a nucleic acid molecule consisting of the nucleotide sequence of any of SEQ ID NOs: 1, 3, 5, 7, 9, 11, 13, 15, 17, 19, 21, 23, 25, 27, 29, 31, 33, 35, 37, 39, 41, 43, 45, 47, 49, 51, 53, 55, 57, 59, 61, 63, 65, 67, 69, 71, 73, 75, 77, 79, 81, 83, 85, 87, 89, 91, 93, 95, 97, 99, 101, 103, 105, 107, 109, 111, 113, 115, 117, 119, 121, 123, 125, 127, 129, 131, 133, 135, 137, 139, 141, 143, 145, 147, 149, 151, 153, 155, 157, 159, 161, and 163, and the nucleotide sequence of any of the clones deposited as ATCC® Accession numbers 98880, 98999, 202171, 98965, 98966, 98899, 207042, 207044, 207043, 207081, 207176, 207222, 207215, 207217, 207221, 207192, 207189, 207223, 207221, 207220, PTA-250, 207178, PTA-250, PTA-249, PTA-292, PTA-291, PTA-295, PTA-455, PTA-438, PTA-454, PTA-425, and PTA-816, or a complement thereof under stringent conditions.

2. The isolated nucleic acid molecule of claim 1, which is selected from the group consisting of:
a) a nucleic acid having the nucleotide sequence of any of SEQ ID NOs: 1, 3, 5, 7, 9, 11, 13,15, 17, 19, 21, 23, 25, 27, 29, 31, 33, 35, 37, 39, 41, 43, 45, 47, 49, 51, 53, 55, 57, 59, 61, 63, 65, 67, 69, 71, 73, 75, 77, 79, 81, 83, 85, 87, 89, 91, 93, 95, 97, 99, 101, 103, 105, 107, 109, 111, 113, 115, 117, 119, 121, 123, 125, 127, 129, 131, 133, 135, 137, 139, 141, 143, 145, 147, 149, 151, 153, 155, 157, 159, 161, and 163, and the nucleotide sequence of any of the clones deposited as ATCC® Accession numbers 98880, 98999, 202171, 98965, 98966, 98899, 207042, 207044, 207043, 207081, 207176, 207222, 207215, 207217, 207221, 207192, 207189, 207223, 207221, 207220, PTA-250, 207178, PTA-250, PTA-249, PTA-292, PTA-291, PTA-295, PTA-455, PTA-438, PTA-454, PTA-425, and PTA-816, or a complement thereof; and
b) a nucleic acid molecule which encodes a polypeptide having the amino acid sequence of any of SEQ ID NOs: 2, 4, 6, 8, 10, 12, 14, 16, 18, 20, 22, 24, 26, 28, 30, 32, 34, 36, 38, 40, 42, 44, 46, 48, 50, 52, 54, 56, 58, 60, 62, 64, 66, 68, 70, 72, 74, 76, 78, 80, 82, 84, 86, 88, 90, 92, 94, 96, 98, 100, 102, 104, 106, 108, 110, 112, 114, 116, 118, 120, 122, 124, 126, 128, 130, 132, 134, 136, 138, 140, 142, 144,146, 148, 150, 152, 154, 156, 158, 160, 162, and 164, and the amino acid sequence encoded by the nucleotide sequence of any of the clones deposited as ATCC® Accession numbers 98880, 98999, 202171, 98965, 98966, 98899, 207042, 207044, 207043, 207081, 207176, 207222, 207215, 207217, 207221, 207192, 207189, 207223, 207221, 207220, PTA-250, 207178, PTA-250, PTA-249, PTA-292, PTA-291, PTA-295, PTA-455, PTA-438, PTA-454, PTA-425, and PTA-816, or a complement thereof.

3. The nucleic acid molecule of claim 1, further comprising vector nucleic acid sequences.

4. The nucleic acid molecule of claim 1 further comprising nucleic acid sequences encoding a heterologous polypeptide.

5. A host cell which contains the nucleic acid molecule of claim 1.

6. The host cell of claim 5 which is a mammalian host cell.

7. A non-human mammalian host cell containing the nucleic acid molecule of claim 1.

8. An isolated polypeptide selected from the group consisting of:
a) a fragment of a polypeptide comprising the amino acid sequence of any of SEQ ID NOs: 2, 4, 6, 8, 10, 12, 14, 16, 18, 20, 22, 24, 26, 28, 30, 32, 34, 36, 38, 40, 42, 44, 46, 48, 50, 52, 54, 56, 58, 60, 62, 64, 66, 68, 70, 72, 74, 76, 78, 80, 82, 84, 86, 88, 90, 92, 94, 96, 98, 100, 102, 104, 106, 108, 110, 112, 114, 116, 118, 120, 122, 124, 126, 128, 130, 132, 134, 136, 138, 140, 142, 144, 146, 148, 150, 152, 154, 156, 158, 160, 162, and 164, and the amino acid sequence encoded by the nucleotide sequence of any of the clones deposited as ATCC® Accession numbers 98880, 98999, 202171, 98965, 98966, 98899, 207042, 207044, 207043, 207081, 207176, 207222, 207215, 207217, 207221, 207192, 207189, 207223, 207221, 207220, PTA-250, 207178, PTA-250, PTA-249, PTA-292, PTA-291, PTA-295, PTA-455, PTA-438, PTA-454, PTA-425, and PTA-816;
b) a naturally occurring allelic variant of a polypeptide comprising the amino acid sequence of any of SEQ ID NOs: 2, 4, 6, 8, 10, 12, 14, 16, 18, 20, 22, 24, 26, 28, 30, 32, 34, 36, 38, 40, 42, 44, 46, 48, 50, 52, 54, 56, 58, 60, 62, 64, 66, 68, 70, 72, 74, 76, 78, 80, 82, 84, 86, 88, 90, 92, 94, 96, 98, 100, 102, 104, 106, 108, 110, 112, 114, 116, 118, 120, 122, 124, 126, 128, 130, 132, 134, 136, 138, 140, 142, 144, 146, 148, 150,152, 154, 156, 158, 160, 162, and 164, wherein the polypeptide is encoded by a nucleic acid molecule which hybridizes with a nucleic acid molecule consisting of the nucleotide sequence of any of SEQ ID NOs: 1, 3, 5, 7, 9, 11, 13, 15, 17, 19, 21, 23, 25, 27, 29, 31, 33, 35, 37, 39, 41, 43, 45, 47, 49, 51, 53, 55, 57, 59, 61, 63, 65, 67, 69, 71, 73, 75, 77, 79, 81, 83, 85, 87, 89, 91, 93, 95, 97, 99, 101, 103, 105, 107, 109, 111, 113, 115, 117, 119, 121, 123, 125, 127, 129, 131, 133, 135, 137, 139, 141, 143, 145, 147, 149, 151, 153, 155, 157, 159, 161, and 163, and the nucleotide sequence of any of the clones deposited as ATCC® Accession numbers 98880, 98999, 202171, 98965, 98966, 98899, 207042, 207044, 207043, 207081, 207176, 207222, 207215, 207217, 207221, 207192, 207189, 207223, 207221, 207220, PTA-250, 207178, PTA-250, PTA-249, PTA-292, PTA-291, PTA-295, PTA-455, PTA-438, PTA-454, PTA-425, and PTA-816, or a complement thereof under stringent conditions; and
c) a polypeptide which is encoded by a nucleic acid molecule comprising a nucleotide sequence which is at least 90% identical to a nucleic acid consisting of the nucleotide sequence of any of SEQ ID NOs: 1, 3, 5, 7, 9, 11, 13, 15, 17, 19, 21, 23, 25, 27, 29, 31, 33, 35, 37, 39, 41, 43, 45, 47, 49, 51, 53, 55, 57, 59, 61, 63, 65, 67, 69, 71, 73, 75, 77, 79, 81, 83, 85, 87, 89, 91, 93, 95, 97, 99, 101, 103, 105, 107, 109, 111, 113, 115, 117, 119, 121, 123, 125, 127, 129, 131, 133, 135, 137, 139, 141, 143, 145, 147,149, 151, 153, 155, 157, 159, 161, and 163, and the nucleotide sequence of any of the clones deposited as ATCC® Accession numbers 98880, 98999, 202171, 98965, 98966, 98899, 207042, 207044, 207043, 207081, 207176, 207222, 207215, 207217, 207221, 207192, 207189, 207223, 207221, 207220, PTA-250, 207178, PTA-250, PTA-249, PTA-292, PTA-291, PTA-295, PTA-455, PTA-438, PTA-454, PTA-425, and PTA-816, or a complement thereof.

9. The isolated polypeptide of claim 8 having the amino acid sequence of any of SEQ ID NOs: 2, 4, 6, 8, 10, 12, 14, 16, 18, 20, 22, 24, 26, 28, 30, 32, 34, 36, 38, 40, 42, 44, 46, 48, 50, 52, 54, 56, 58, 60, 62, 64, 66, 68, 70, 72, 74, 76, 78, 80, 82, 84, 86, 88, 90, 92, 94, 96, 98, 100, 102, 104, 106, 108, 110, 112, 114, 116, 118, 120, 122, 124, 126, 128, 130, 132, 134, 136, 138, 140, 142, 144, 146, 148, 150, 152, 154, 156, 158, 160, 162, and 164, and the amino acid sequence encoded by the nucleotide sequence of any of the clones deposited as ATCC® Accession numbers 98880, 98999, 202171, 98965, 98966, 98899, 207042, 207044, 207043, 207081, 207176, 207222, 207215, 207217, 207221, 207192, 207189, 207223, 207221, 207220, PTA-250, 207178, PTA-250, PTA-249, PTA-292, PTA-291, PTA-295, PTA-455, PTA-438, PTA-454, PTA-425, and PTA-816.

10. The polypeptide of claim 8, wherein the amino acid sequence of the polypeptide further comprises heterologous amino acid residues.

11. An antibody which selectively binds with the polypeptide of claim 8.

12. A method for producing a polypeptide selected from the group consisting of:
a) a polypeptide comprising the amino acid sequence of any of SEQ ID NOs: 2, 4, 6, 8, 10, 12, 14, 16, 18, 20, 22, 24, 26, 28, 30, 32, 34, 36, 38, 40, 42, 44, 46, 48, 50, 52, 54, 56, 58, 60, 62, 64, 66, 68, 70, 72, 74, 76, 78, 80, 82, 84, 86, 88, 90, 92, 94, 96, 98, 100, 102, 104, 106, 108, 110, 112, 114, 116, 118, 120, 122, 124, 126, 128, 130, 132, 134, 136, 138, 140, 142, 144, 146, 148, 150, 152, 154, 156, 158, 160, 162, and 164, and the amino acid sequence encoded by the nucleotide sequence of any of the clones deposited as ATCC® Accession numbers 98880, 98999, 202171, 98965, 98966, 98899, 207042, 207044, 207043, 207081, 207176, 207222, 207215, 207217, 207221, 207192, 207189, 207223, 207221, 207220, PTA-250, 207178, PTA-250, PTA-249, PTA-292, PTA-291, PTA-295, PTA-455, PTA-438, PTA-454, PTA-425, and PTA-816;
b) a polypeptide comprising a fragment of the amino acid sequence of any of SEQ ID NOs: 2, 4, 6, 8, 10, 12, 14, 16, 18, 20, 22, 24, 26, 28, 30, 32, 34, 36, 38, 40, 42, 44, 46, 48, 50, 52, 54, 56, 58, 60, 62, 64, 66, 68, 70, 72, 74, 76, 78, 80, 82, 84, 86, 88, 90, 92, 94, 96, 98, 100, 102, 104, 106, 108, 110, 112, 114, 116, 118, 120, 122, 124, 126, 128, 130, 132, 134, 136, 138, 140, 142, 144, 146, 148, 150, 152, 154, 156, 158, 160, 162, and 164, and the amino acid sequence encoded by the nucleotide sequence of any of the clones deposited as ATCC® Accession numbers 98880, 98999, 202171, 98965, 98966, 98899, 207042, 207044, 207043, 207081, 207176, 207222, 207215, 207217, 207221, 207192, 207189, 207223, 207221, 207220, PTA-250, 207178, PTA-250, PTA-249, PTA-292, PTA-291, PTA-295, PTA-455, PTA-438, PTA-454, PTA-425, and PTA-816, wherein the fragment comprises at least 10 contiguous amino acids of any of SEQ ID NOs: 2, 4, 6, 8, 10, 12, 14, 16, 18, 20, 22, 24, 26, 28, 30, 32, 34, 36, 38, 40, 42, 44, 46, 48, 50, 52, 54, 56, 58, 60, 62, 64, 66, 68, 70, 72, 74, 76, 78, 80, 82, 84, 86, 88, 90, 92, 94, 96, 98, 100, 102, 104, 106, 108, 110, 112, 114, 116, 118, 120, 122, 124, 126, 128, 130, 132, 134, 136, 138, 140, 142, 144, 146, 148, 150, 152, 154, 156, 158, 160, 162, and 164, and the amino acid sequence encoded by the nucleotide sequence of any of the clones deposited as ATCC® Accession numbers 98880, 98999, 202171, 98965, 98966, 98899, 207042, 207044, 207043, 207081, 207176, 207222, 207215, 207217, 207221, 207192, 207189, 207223, 207221, 207220, PTA-250, 207178, PTA-250, PTA-249, PTA-292, PTA-291, PTA-295, PTA-455, PTA-438, PTA-454, PTA-425, and PTA-816; and
c) a naturally occurring allelic variant of a polypeptide comprising the amino acid sequence of any of SEQ ID NOs: 2, 4, 6, 8, 10, 12, 14, 16, 18, 20, 22, 24, 26, 28, 30, 32, 34, 36, 38, 40, 42, 44, 46, 48, 50, 52, 54, 56, 58, 60, 62, 64, 66, 68, 70, 72, 74, 76, 78, 80, 82, 84, 86, 88, 90, 92, 94, 96, 98, 100, 102, 104, 106, 108, 110, 112, 114, 116, 118, 120, 122, 124, 126, 128, 130, 132, 134, 136, 138, 140, 142, 144, 146, 148, 150, 152, 154, 156, 158, 160, 162, and 164, or a complement thereof, wherein the polypeptide is encoded by a nucleic acid molecule which hybridizes with a nucleic acid molecule consisting of the nucleotide sequence of any of SEQ ID NOs: 1, 3, 5, 7, 9, 11, 13, 15, 17, 19, 21, 23, 25, 27, 29, 31, 33, 35, 37, 39, 41, 43, 45, 47, 49, 51, 53, 55, 57, 59, 61, 63, 65, 67, 69, 71, 73, 75, 77, 79, 81, 83, 85, 87, 89, 91, 93, 95, 97, 99, 101, 103, 105, 107, 109, 111, 113, 115, 117, 119, 121, 123, 125, 127, 129, 131, 133, 135, 137, 139, 141, 143, 145, 147, 149, 151, 153, 155, 157, 159, 161, and 163, and the nucleotide sequence of any of the clones deposited as ATCC® Accession numbers 98880, 98999, 202171, 98965, 98966, 98899, 207042, 207044, 207043, 207081, 207176, 207222, 207215, 207217, 207221, 207192, 207189, 207223, 207221, 207220, PTA-250, 207178, PTA-250, PTA-249, PTA-292, PTA-291, PTA-295, PTA-455, PTA-438, PTA-454, PTA-425, and PTA-816, or a complement thereof under stringent conditions;
the method comprising culturing the host cell of claim 5 under conditions in which the nucleic acid molecule is expressed.

13. A method for detecting the presence of a polypeptide of claim 8 in a sample, comprising:
a) contacting the sample with a compound which selectively binds with a polypeptide of claim 8; and
b) determining whether the compound binds with the polypeptide in the sample.

14. The method of claim 13, wherein the compound which binds with the polypeptide is an antibody.

15. A kit comprising a compound which selectively binds with a polypeptide of claim 8 and instructions for use.

16. A method for detecting the presence of a nucleic acid molecule of claim 1 in a sample, comprising the steps of:
a) contacting the sample with a nucleic acid probe or primer which selectively hybridizes with the nucleic acid molecule; and
b) determining whether the nucleic acid probe or primer binds with a nucleic acid molecule in the sample.

17. The method of claim 16, wherein the sample comprises mRNA molecules and is contacted with a nucleic acid probe.

18. A kit comprising a compound which selectively hybridizes with a nucleic acid molecule of claim 1 and instructions for use.

19. A method for identifying a compound which binds with a polypeptide of claim 8 comprising the steps of:
a) contacting a polypeptide, or a cell expressing a polypeptide of claim 8 with a test compound; and
b) determining whether the polypeptide binds with the test compound.

20. The method of claim 19, wherein the binding of the test compound to the polypeptide is detected by a method selected from the group consisting of:
a) detection of binding by direct detecting of test compound/polypeptide binding;
b) detection of binding using a competition binding assay;
c) detection of binding using an assay for an activity characteristic of the polypeptide.

21. A method for modulating the activity of a polypeptide of claim 8 comprising contacting a polypeptide or a cell expressing a polypeptide of claim 8 with a compound which binds with the polypeptide in a sufficient concentration to modulate the activity of the polypeptide.

22. A method for identifying a compound which modulates the activity of a polypeptide of claim 8, comprising:
a) contacting a polypeptide of claim 8 with a test compound; and
b) determining the effect of the test compound on the activity of the polypeptide to thereby identify a compound which modulates the activity of the polypeptide.

23. An antibody substance which selectively binds with the polypeptide of claim 8.

24. A method of making an antibody substance which selectively binds with the polypeptide of claim 8, the method comprising providing the polypeptide to an immunocompetent vertebrate and thereafter harvesting from the vertebrate blood or serum comprising the antibody substance.

25. A method of making an antibody substance which selectively binds with the polypeptide of claim 8, the method comprising contacting the polypeptide with a plurality of particles which individually comprise an antibody substance and a a nucleic acid encoding the antibody substance, segregating a particle which selectively binds with the polypeptide, and expressing the antibody substance from the nucleic acid of the segregated particle.

26. The isolated nucleic acid of claim 1, wherein the isolated nucleic acid comprises a portion having the nucleotide sequence of one of SEQ ID NOs: 1, 3, 5, 7, 9, 11, 13, 15, 17, 19, 21, 23, 25, 27, 29, 31, 33, 35, 37, 39, 41, 43, 45, 47, 49, 51, 53, 55, 57, 59, 61, 63, 65, 67, 69, 71, 73, 75, 77, 79, 81, 83, 85, 87, 89, 91, 93, 95, 97, 99, 101, 103, 105, 107, 109, 111, 113, 115, 117, 119, 121, 123, 125, 127, 129, 131, 133, 135, 137, 139, 141, 143, 145, 147, 149, 151, 153, 155, 157, 159, 161, and 163.

27. The isolated polypeptide of claim 8, wherein the amino acid sequence of the isolated polypeptide is one of SEQ ID NOs: 2, 4, 6, 8, 10, 12, 14, 16, 18, 20, 22, 24, 26, 28, 30, 32, 34, 36, 38, 40, 42, 44, 46, 48, 50, 52, 54, 56, 58, 60, 62, 64, 66, 68, 70, 72, 74, 76, 78, 80, 82, 84, 86, 88, 90, 92, 94, 96, 98, 100, 102, 104, 106, 108, 110, 112, 114, 116, 118, 120, 122, 124, 126, 128, 130, 132, 134, 136, 138, 140, 142, 144, 146, 148, 150, 152, 154, 156, 158, 160, 162, and 164.
